(19) United States
(12) Patent Application Publication
(10) Pub. No.: US 2006/0088532 A1
(43) Pub. Date: Apr. 27, 2006

(54) Lymphatic and blood endothelial cell genes

(76) Inventors: Kari Alitalo, Helsinki (FI); Taija Makinen, Helsinki (FI); Tatiana Petrova, Helsinki (FI); Pipsa Saharinen, Helsinki (FI); Juha Saharinen, Helsinki (FI)

Correspondence Address: MARSHALL, GERSTEIN & BORUN LLP, 233 S. WACKER DRIVE, SUITE 6300, SEARS TOWER, CHICAGO, IL, 60606, US

(21) Appl. No.: 10/505,928

(22) PCT Filed: Mar. 7, 2003
(86) PCT No.: PCT/US03/06900

§ 371 Date: Sep. 8, 2005

Related U.S. Application Data
(60) Provisional application No. 60/363,019, filed on Mar. 7, 2002.

(51) Int. Cl. A61K 48/00; A61K 39/395; A61K 38/18

(52) U.S. Cl. 424/145.1; 514/2; 514/44

(57) ABSTRACT

The invention provides polynucleotides and genes that are differentially expressed in lymphatic versus blood vascular endothelial cells. These genes are useful for treating diseases involving lymphatic vessels, such as lymphedema, various inflammatory diseases, and cancer metastasis via the lymphatic system.

### BACKGROUND OF THE INVENTION

[0001] 1. Field of the Invention

[0002] The invention relates to polynucleotides and proteins specifically expressed in lymphatic endothelial cells.

[0003] 2. Description of the Related Art

[0004] Recent evidence on the association of lymphangiogenic growth factors with intralymphatic growth and metastasis of cancers (Mandriota, et al., EMBO J. 20:672-682 (2001); Skobe, et al., Nat. Med. 7:192-198 (2001); Stacker, et al., Nat. Med. 7:186-191 (2001);. Karpanen, et al., Cancer Res. 61:1786-1790 (2001)) has raised hopes that lymphatic vessels could be used as an additional target for tumor therapy. Cancer cells spread within the body by direct invasion to surrounding tissues, spreading to body cavities, invasion into the blood vascular system (hematogenous metastasis), as well as spread via the lymphatic system (lymphatic metastasis). Regional lymph node dissemination is the first step in the metastasis of several common cancers and correlates highly with the prognosis of the disease. The lymph nodes that are involved in draining tissue fluid from the tumor area are called sentinel nodes, and diagnostic measures are in place to find these nodes and to remove them in cases of suspected metastasis. However, in spite of its clinical relevance, little is known about the mechanisms leading to metastasis via the bloodstream or via the lymphatics.

[0005] Until recently, the lymphatic vessels have received much less attention than blood vessels, despite their importance in medicine. Lymphatic vessels collect protein-rich fluid and white blood cells from the interstitial space of most tissues and transport them as a whitish opaque fluid, the lymph, into the blood circulation. Small lymphatic vessels coalesce into larger vessels, which drain the lymph through the thoracic duct into large veins in the neck region. Lymph nodes serve as filtering stations along the lymphatic vessels and lymph movement is propelled by the contraction of smooth muscles surrounding collecting lymphatic vessels and by bodily movements, the direction of flow being secured by valves as it is in veins. The lymphatic capillaries are lined by endothelial cells, which have distinct junctions with frequent large interendothelial gaps. The lymphatic capillaries also lack a continuous basement membrane, and are devoid of pericytes. Anchoring filaments connect the abluminal surfaces of lymphatic endothelial cells to the perivascular extracellular matrix and pull to maintain vessel patency in the presence of tissue edema. The absence or obstruction of lymphatic vessels, which is usually the result of an infection, surgery, or radiotherapy and in rare cases, a genetic defect, causes accumulation of a protein-rich fluid in tissues, lymphedema. The lymphatic system is also critical in fat absorption from the gut and in immune responses. Bacteria, viruses, and other foreign materials are taken up by the lymphatic vessels and transported to the lymph nodes, where the foreign material is presented to immune cells and where dendritic cells traverse via the lymphatics. There has been slow progress in the understanding of and ability to manipulate the lymphatic vessels.

[0006] Abnormal development or function of the lymphatic ECs can result in tumors or malformations of the lymphatic vessels, such as lymphangiomas or lymphangiectasis. Witte, et al., Regulation of Angiogenesis (eds. Goldber, I. D. & Rosen, E. M.) 65-112 (Birkauser, Basel, Switzerland, 1997). The VEGFR-3 tyrosine kinase receptor is expressed in the normal lymphatic endothelium and is upregulated in many types of vascular tumors, including Kaposi's sarcomas. Jussila, et al., Cancer Res 58, 1955-1604 (1998); Partanen, et al., Cancer 86:2406-2412 (1999). Absence or dysfunction of lymphatic vessels which can result from an infection, surgery, radiotherapy or from a genetic defect, causes lymphedema, which is characterized by a chronic accumulation of protein-rich fluid in the tissues that leads to swelling. The importance of VEGFR-3 signaling for lymphangiogenesis was revealed in the genetics of familial lymphedema, a disease characterized by a hypoplasia of cutaneous lymphatic vessels, which leads to a disfiguring and disabling swelling of the extremities. Witte, et al., Regulation of Angiogenesis (eds. Goldber, I. D. & Rosen, E. M.) 65-112 (Birkauser, Basel, Switzerland, 1997); Rockson, S. G, Am. J. Med. 110, 288-295 (2001). Some members of families with lymphoedema are heterozygous for missense mutations of the VEGFR3 exons encoding the tyrosine kinase domain, which results in an inactive receptor protein. Karkkainen, et al., Nature Genet. 25:153-159 (2000); Irrthum, et al., Am. J. Hum. Genet. 67:295-301 (2000).

[0007] There is a need in the art for information on the transcriptional program which controls the diversity of endothelial cells, and into the mechanisms of angiogenesis and lymphangiogenesis. There is also a need in the art for new vascular markers, which may be used as valuable targets in the study of a number of diseases involving the lymphatic vessels, including tumor metastasis.

### SUMMARY OF THE INVENTION[TO BE REVISED UPON FINALIZATION OF CLAIMS]

[0008] The compositions of the present invention include isolated polynucleotides, in particular, lymphatic endothelial genes, polypeptides, isolated polypeptides encoded by these polynucleotides, recombinant DNA molecules, cloned genes or degenerate variants thereof, especially naturally occurring variants such as allelic variants, and antibodies that specifically recognize one or more epitopes present on such polypeptides.

[0009] The compositions of the present invention additionally include vectors, including expression vectors, containing the polynucleotides of the invention, cells genetically engineered to contain such polynucleotides and cells genetically engineered to express such polynucleotides.

[0010] In selected embodiments, such isolated polynucleotides of the invention represent a polynucleotide comprising a nucleotide sequence set forth in the sequence listing, e.g., any of SEQ ID NOS:1-30.

[0011] The polynucleotides of the present invention also include, but are not limited to, a polynucleotide that hybridizes to the complement of the nucleotide sequence of SEQ ID NOS:1-30 under highly stringent hybridization conditions; a polynucleotide that hybridizes to the complement of the nucleotide sequence of SEQ ID NOS:1-30 under moderately stringent hybridization conditions; a polynucleotide which is an allelic variant of any polynucleotide recited above; a polynucleotide which encodes a species homologue of any of the proteins recited above; of a polynucleotide that encodes a polypeptide comprising a specific domain or truncation of the polypeptide encoded by any one of SEQ ID NOS:1-30. Exemplary high stringency hybridization conditions are hybridization at 42° C. for 20 hours in a solution containing 50% formamide, 5×SSPE, 5× Denhardt's solution, 0.1% SDS and 0.1 mg/ml denatured salmon sperm DNA, with a wash in 1×SSC, 0.1% SDS for 30 minutes at 65° C.

[0012] Another aspect of the invention is drawn to LEC and BEC polypeptides, including polypeptides encoded by the polynucleotides described above. In some embodiments, the polypeptides are the mature forms of the polypeptides of the invention. Expressly contemplated is a purified and isolated polypeptide comprising an amino acid sequence selected from the group consisting of SEQ ID NOS: 31-44, 46, 48, 50, 52, 81, 187, 207, 211, 221, 235, 241, 293, and 391; and a purified and isolated polypeptide comprising an amino acid sequence selected from the group consisting of: (a) SEQ ID NOS: 31-34, 46, 48, 207, 676, 859, and 861; and (b) an extracellular domain fragment of at least 10 amino acids of an amino acid sequence of (a). Further, this aspect of the invention includes a purified and isolated, soluble polypeptide as described immediately above, comprising an extracellular domain fragment of an amino acid sequence selected from the group consisting of: SEQ ID NOS: 31-34, 46, 48, 207, 676, 859, and 861, wherein the polypeptide lacks any transmembrane domain. Such a polypeptide may further lack any intracellular domain. Also, the invention contemplates a fusion protein comprising a polypeptide as described above fused to an immunoglobulin fragment comprising an immunoglobulin constant region.

[0013] In a related aspect, the invention provides a composition comprising a polypeptide or protein as described above and a pharmaceutically acceptable diluent, carrier or adjuvant; Polypeptide compositions of the invention may comprise an acceptable carrier, such as a hydrophilic, e.g., pharmaceutically acceptable, carrier. Further provided is a kit comprising such a composition and a protocol for administering the pharmaceutical composition to a mammalian subject to modulate the lymphatic system in the subject. The invention also provides an antibody that specifically binds to a polypeptide as described above, and that antibody is humanized in some embodiments. Still further, the invention provides a protein comprising an antigen binding domain of an antibody that specifically binds to a polypeptide as described hereinabove, wherein the protein specifically binds to the polypeptide.

[0014] The invention also relates to methods for producing a polypeptide comprising growing a culture of the cells of the invention in a suitable culture medium, and purifying the protein from the culture or from an extract of the cells. In particular, the invention contemplates a method for producing a LEC polypeptide comprising steps of growing a host cell transformed or transfected with an expression vector as described herein under conditions in which the cell expresses the polypeptide encoded by the polynucleotide.

[0015] Methods of identifying the products and compositions described herein are also provided by the invention. In particular, the invention provides a method of identifying a LEC nucleic acid comprising: (a) contacting a biological sample containing a candidate LEC nucleic acid with a polynucleotide comprising a fragment of at least 14 contiguous nucleotides of a sequence selected from the group consisting of SEQ ID NOS:1-30, 45, 47, 49, 51, 82, 93, 111, 188, 208, 212, 236, 242, 294, and 392, or a complement thereof, under the following stringent hybridization conditions: (i) hybridization at 42° C. for 20 hours in a solution containing 50% formamide, 5×SSPE, 5× Denhardt's solution, 0.1% SDS and 0.1 mg/ml denatured salmon sperm DNA, and (ii) washing for 30 minutes at 65° C. in 1×SSC, 0.1% SDS; and (b) detecting hybridization of the candidate LEC nucleic acid and the polynucleotide, thereby identifying a LEC nucleic acid.

[0016] The invention also provides a method of identifying a LEC protein comprising: (a) contacting a biological sample containing a candidate LEC protein with a LEC protein binding partner selected from the group consisting of an antibody as described herein or a protein or polypeptide as described herein, under conditions suitable for binding therebetween; and (b) detecting binding between the candidate LEC protein and the LEC binding partner, thereby identifying a LEC protein.

[0017] Another related aspect of the invention is a method of identifying a LEC comprising: (a) contacting a biological sample comprising cells with a LEC binding partner under conditions suitable for binding therebetween, wherein the LEC binding partner comprises an antibody that binds to a polypeptide comprising a sequence selected from the group consisting of SEQ ID NOS:31-34, 46, 48, 207, 676, 859, and 861, or comprises an antigen binding fragment of the antibody; and (b) identifying a LEC by detecting binding between a cell and the LEC binding partner, where binding of the LEC binding partner to the cell identifies a LEC.

[0018] Polynucleotides according to the invention have numerous applications in a variety of techniques known to those skilled in the art of molecular biology. These techniques include use as hybridization probes, use as primers for PCR, use for chromosome and gene mapping, use in the recombinant production of protein, and use in generation of anti-sense DNA or RNA, their chemical analogs and the like. For example, when the expression of an mRNA is largely restricted to a particular cell or tissue type, such as a lymphatic endothelial cell, polynucleotides of the invention can be used as hybridization probes to detect the presence of the particular cell or tissue mRNA in a sample using, e.g., in situ hybridization.

[0019] In another aspect, the invention provides a composition comprising an isolated polynucleotide that comprises a nucleotide sequence that encodes a polypeptide comprising an amino acid sequence selected from the group consisting of SEQ ID NOs: 31-44, 46, 48, 50, 52, 81, 187, 207, 211, 221, 235, 241, 293, and 391; and a pharmaceutically acceptable diluent, carrier or adjuvant. In some embodiments, the composition comprises a polynucleotide that comprises a nucleotide sequence selected from the group consisting of SEQ ID NOS: 14-30, 45, 47, 49, 51, 82, 93, 111, 188, 208, 212, 222, 236, 242, 294, and 392, or a fragment thereof that encodes the polypeptide.

[0020] Still another aspect of the invention is an expression vector comprising an expression control sequence operably linked to a polynucleotide that comprises a nucleotide sequence that encodes a polypeptide comprising an amino acid sequence selected from the group consisting of SEQ ID NOs: 31-44, 46, 48, 50, 52, 81, 187, 207, 211, 221, 235, 241, 293, and 391. In some embodiments, the expression vector is a replication-deficient adenoviral or adeno-associated viral vector containing the polynucleotide. A related aspect of the invention is a composition comprising an expression vector as described above and a pharmaceutically acceptable diluent, carrier, or adjuvant. Further, the invention provides a kit comprising the composition containing either the above-described polynucleotide or vector and a pharmaceutically acceptable diluent, carrier or adjuvant, packaged with a protocol for administering the composition to a mammalian subject to modulate the lymphatic system in the subject.

[0021] The invention further provides a host cell transformed or transfected with an expression vector as described above.

[0022] The polypeptides according to the invention can be used in a variety of conventional procedures and methods that are currently applied to other proteins. In addition, a polypeptide of the invention can be used to generate an antibody that specifically binds the polypeptide.

[0023] In one aspect of the invention, a method is provided for differentially modulating the growth or differentiation of blood endothelial cells (BEC) or lymphatic endothelial cells (LEC), comprising contacting endothelial cells with a composition comprising an agent that differentially modulates blood or lymphatic endothelial cells, said agent selected from the group consisting of: (a) a polypeptide that comprises an amino acid sequence of a BEC polypeptide or a LEC polypeptide, or an active fragment of the polypeptide; (b) a polynucleotide that comprises a nucleotide sequence that encodes a polypeptide according to (a); (c) an antibody that specifically binds to a polypeptide according to (a); (d) a polypeptide comprising a fragment of the antibody of (c), wherein the fragment and the antibody bind to the polypeptide; (e) an antisense nucleic acid to a human gene or mRNA encoding the polypeptide of (a); (f) an interfering RNA (RNAi) to a human gene or mRNA encoding the polypeptide of (a). The method may involve endothelial cell contact with the composition ex vivo or in vivo. The composition may comprise a pharmaceutically acceptable diluent, adjuvant, or carrier, and the contacting step may comprise administering the composition to a mammalian subject to differentially modulate BECs or LECs in the mammalian subject.

[0024] Further, the method may comprise identifying a human subject with a disorder characterized by hyperproliferation of LECs; and administering to the human subject the composition, wherein the agent differentially inhibits LEC growth compared to BEC growth; alternatively the method may comprise identifying a human subject with a disorder characterized by hyperproliferation of LECs; screening LECs of the subject to identify overexpression of a polypeptide set forth in Table 3; and administering to the human subject the composition, wherein the agent differentially inhibits LEC growth compared to BEC growth by inhibiting expression of the polypeptide identified by the screening step.

[0025] This aspect of the invention also contemplates a method of modulating the growth of lymphatic endothelial cells in a human subject, comprising steps of identifying a human subject with a hypoproliferative lymphatic disorder; screening the subject to identify underexpression or underactivity of a LEC polypeptide set forth in Table 3, wherein the protein is not set forth in Table 1 or 2; administering to the human subject the composition, wherein the agent comprises the LEC polypeptide (a) identified by the screening step or an active fragment of the polypeptide, or comprises the polynucleotide (b) that comprises a nucleotide sequence that encodes the polypeptide.

[0026] A related aspect of the invention is drawn to a use of an agent for the manufacture of a medicament for the differential modulation of blood vessel endothelial cell (BEC) or lymphatic vessel endothelial cell (LEC) growth or differentiation, the agent selected from the group consisting of: (a) a polypeptide that comprises an amino acid sequence of a BEC polypeptide or a LEC polypeptide, or an active fragment of the polypeptide; (b) a polynucleotide that comprises a nucleotide sequence that encodes a polypeptide according to (a); (c) an antibody that specifically binds to a polypeptide according to (a); (d) a polypeptide comprising a fragment of the antibody of (c), wherein the fragment and the antibody bind to the polypeptide; (e) an antisense nucleic acid to a human gene or mRNA encoding the polypeptide of (a); (f) an interfering RNA (RNAi) to a human gene or mRNA encoding the polypeptide of (a).

[0027] In another aspect, the invention provides a method of identifying compounds that modulate growth of endothelial cells, comprising culturing endothelial cells in the presence and absence of a compound; and measuring expression of at least one BEC or LEC gene in the cells, wherein the BEC or LEC gene is selected from the genes encoding polypeptides set forth in Tables 3 and 4, wherein a change in expression of at least one BEC gene in the presence compared to the absence of the compound identifies the compound as a modulator of BEC growth, and wherein a change in expression of at least one LEC gene in the presence compared to the absence of the compound identifies the compound as a modulator of LEC growth. The method may be used to screen for a compound that selectively modulates BEC or LEC growth or differentiation, wherein the measuring step comprises measuring expression of at least one BEC gene and at least one LEC gene in the cells, and wherein the method comprises screening for a compound that selectively modulates BEC or LEC growth or differentiation by selecting a compound that differentially modulates expression of the at least one BEC gene compared to expression of the at least one LEC gene.

[0028] Further, the invention comprehends a method or use according to the aspects of the invention described above, wherein the polypeptide is a LEC polypeptide selected from the LEC polypeptides set forth in Table 3, and the agent differentially modulates LEC growth or differentiation over BEC growth or differentiation. In some embodiments, the LEC polypeptide comprises an amino acid sequence selected from the group consisting of SEQ ID NOs: 81, 187, 207, 211, 221, 235, 241, 293, and 391; in other embodiments, the LEC polypeptide comprises an amino acid sequence selected from the group consisting of SEQ ID NOs: 31-34, 46, and 48. In these embodiments, an agent may be an antibody that specifically binds to a LEC polypeptide as described above, or a polypeptide fragment of such an antibody. Further, the agent may be an extracellular domain of a polypeptide described above, a polynucleotide encoding an extracellular domain, or an antisense molecule or nucleic acid. Alternatively, the polypeptide is a BEC polypeptide selected from the BEC polypeptides set forth in Table 4, and the agent differentially modulates BEC growth or differentiation over LEC growth or differentiation. Preferably, the polypeptides are not set forth in Tables 1 or 2.

[0029] The methods of the present invention further relate to methods for detecting the presence of the polynucleotides or polypeptides of the invention in a sample. Such methods can, for example, be utilized as part of prognostic and diagnostic evaluation of disorders as recited above and for the identification of subjects exhibiting a predisposition to such conditions. Furthermore, the invention provides methods for evaluating the efficacy of drugs, and monitoring the progress of patients, involved in clinical trials for the treatment of disorders related to lymphatic endothelial cells.

[0030] The invention also provides methods for the identification of compounds that modulate the expression of the polynucleotides and/or polypeptides of the invention. Such methods can be utilized, for example, for the identification of compounds that can ameliorate symptoms of disorders related to expression of proteins encoded by any one of SEQ ID NOS:1-30 as recited above. Such methods can include, but are not limited to, assays for identifying compounds and other substances that interact with (e.g., bind to) the polypeptides of the invention.

[0031] Further, the invention provides a method of assaying for risk of developing hereditary lymphedema, comprising (a) assaying nucleic acid of a human subject for a mutation that correlates with a hereditary lymphedema phenotype and alters the encoded amino acid sequence of at least one gene allele of the human subject when compared to the amino acid sequence of the polypeptide encoded by a corresponding wild-type gene allele, wherein the wild-type polypeptide is a polypeptide identified in Table 3. Alternatively, a method of assaying for risk of developing hereditary lymphedema, comprises (a) assaying nucleic acid of a human subject for a mutation that correlates with a hereditary lymphedema phenotype and alters the encoded amino acid sequence of at least one gene allele of the human subject when compared to the amino acid sequence of the polypeptide encoded by a corresponding wild-type gene allele, wherein the wild-type polypeptide comprises an amino acid sequence selected from the group consisting of SEQ D NOS: 31-44, 46, 48, 52, 54, 207, 676, 859, and 861; (b) correlating the presence or absence of the mutation in the nucleic acid to a risk of developing hereditary lymphedema, wherein the presence of the mutation in the nucleic acid correlates with an increased risk of developing hereditary lymphedema, and wherein the absence of the mutation in the nucleic acid correlates with no increased risk of developing hereditary lymphedema.

[0032] In another method of assaying for risk of developing hereditary lymphedema, the steps comprise (a) assaying nucleic acid of a human subject for a mutation that alters the encoded amino acid sequence of at least one transcription factor allele of the human subject and alters transcription modulation activity of the transcription factor polypeptide encoded by the allele, when compared to the transcription modulation activity of a transcription factor polypeptide encoded by a wild-type allele, wherein the wild-type transcription factor polypeptide comprises an amino acid sequence selected from the group consisting of SEQ ID NO: 81, SEQ ID NO: 211, SEQ ID NO: 241, and transcription factors encoded by sequences in Table 5; and (b) correlating the presence or absence of the mutation in the nucleic acid to a risk of developing hereditary lymphedema, wherein the presence of the mutation in the nucleic acid correlates with an increased risk of developing hereditary lymphedema, and wherein the absence of the mutation in the nucleic acid correlates with no increased risk of developing hereditary lymphedema. In this method, the wild-type transcription factor allele may comprise the Sox18 amino acid sequence set forth as SEQ ID NO:54. In some embodiments of this method, the assaying identifies a mutation altering a transactivating or DNA binding domain amino acid sequence of the protein encoded by the Sox18 allele; in some other embodiments of the method, the mutation reduces transcriptional activation of a SOX18-responsive gene compared to transcriptional activation of the gene by wild-type SOX18.

[0033] In a related aspect, the invention provides a method of assaying for risk of developing hereditary lymphedema, comprising (a) assaying nucleic acid of a human subject for a mutation that alters the encoded amino acid sequence of at least one LEC gene allele of the human subject and alters the binding affinity of the adhesion polypeptide encoded by the LEC gene allele, when compared to the binding affinity of an adhesion polypeptide encoded by a wild-type allele, wherein the wild-type adhesion polypeptide comprises an amino acid sequence selected from the group consisting of SEQ ID NOS:31-34, 46, 207, 676, 859, and 861; and (b) correlating the presence or absence of the mutation in the nucleic acid to a risk of developing hereditary lymphedema, wherein the presence of the mutation in the nucleic acid correlates with an increased risk of developing hereditary lymphedema, and wherein the absence of the mutation in the nucleic acid correlates with no increased risk of developing hereditary lymphedema. In some embodiments of this method, the at least one gene corresponds to the human Sox18 gene that encodes the amino acid sequence set forth in SEQ ID NO: 54.

[0034] In the methods of assaying for risk of developing hereditary lymphedema according to the invention, the assaying may identify the presence of the mutation, and the correlating step may identify the increased risk of the patient developing hereditary lymphedema.

[0035] A related method according to the invention is a method of screening a human subject for an increased risk of developing hereditary lymphedema comprising assaying nucleic acid of a human subject for a mutation that alters the encoded amino acid sequence of at least one polypeptide comprising an amino acid sequence of Table 3. In some embodiments of this method, the polypeptide comprises an amino acid sequence selected from the group consisting of SEQ ID NOS: 31-44, 46, 48, 50, 52, and 54, 207, 676, 859, and 861 in a manner that correlates with the risk of developing hereditary lymphedema, and it is expressly contemplated that the polypeptide may comprise the SOX18 amino acid sequence set forth in SEQ ID NO: 54.

[0036] A related aspect of the invention is drawn to methods of assaying or screening for risk of developing hereditary lymphedema as described above, wherein the method comprises at least one procedure selected from the group consisting of: (a) determining a nucleotide sequence of at least one codon of at least one polynucleotide of the human subject; (b) performing a hybridization assay to determine whether nucleic acid from the human subject has a nucleotide sequence identical to or different from one or more reference sequences; (c) performing a polynucleotide migration assay to determine whether nucleic acid from the human subject has a nucleotide sequence identical to or different from one or more reference sequences; and (d) performing a restriction endonuclease digestion to determine whether nucleic acid from the human subject has a nucleotide sequence identical to or different from one or more reference sequences.

[0037] A related aspect of the invention provides methods of assaying or screening for risk of developing hereditary lymphedema as described above, wherein the method comprises: performing a polymerase chain reaction (PCR) to amplify nucleic acid comprising the coding sequence of the LEC polynucleotide, and determining nucleotide sequence of the amplified nucleic acid.

[0038] Further provided by the invention is a method of screening for a hereditary lymphedema genotype in a human subject, comprising: (a) providing a biological sample comprising nucleic acid from said subject, and (b) analyzing the nucleic acid for the presence of a mutation altering the encoded amino acid sequence of the at least one allele of at least one gene in the human subject relative to a human gene encoding an amino acid sequence selected from the group consisting of SEQ ID NOs: 31-44, 46, 48, 50, 52, 54, 207, 676, 859, and 861, wherein the presence of a mutation altering the encoded amino acid sequence in the human subject in a manner that correlates with lymphedema in human subjects identifies a hereditary lymphedema genotype. In some embodiments of this method, the biological sample is a cell sample. In other embodiments of this method, the analyzing comprises sequencing a portion of the nucleic acid. In still further embodiments of this method, the human subject has a hereditary lymphedema genotype identified by the method of screening.

[0039] Another aspect of the invention provides a method of inhibiting lymphangiogenesis comprising administering to a subject an inhibitor of a LEC transmembrane polypeptide, wherein the LEC transmembrane polypeptide comprises an amino acid sequence selected from the group consisting of SEQ ID NOs: 31-34, 46 48, 207, 676, 859, and 861, and wherein the inhibitor is selected from the group consisting of (a) a soluble extracellular domain fragment of the LEC transmembrane polypeptide; (b) an antibody that binds to the extracellular domain of the LEC transmembrane polypeptide; (c) a polypeptide comprising an antigen binding domain of the antibody according to (b); and (d) an antisense nucleic acid complementary to the nucleic acid encoding the LEC transmembrane polypeptide or its complement. In some embodiments of the method, the inhibitor is a polypeptide comprising an extracellular domain fragment of an LEC polypeptide, wherein the sequence of the extracellular domain is selected from the group consisting of amino acids 1-152 of SEQ ID NO:31, amino acids 1-695 of SEQ ID NO:32 and amino acids 1-248 of SEQ ID NO:33. In some embodiments of the method, the subject is a human containing a tumor.

[0040] In a related aspect, the invention provides a method for modulating lymphangiogenesis in a mammalian subject comprising: administering to a mammalian subject in need of modulation of lymphangiogenesis an antisense molecule to a LEC polynucleotide, in an amount effective to inhibit transcription or translation of the polypeptide encoded by the LEC polynucleotide, wherein the LEC polynucleotide comprises a nucleotide sequence selected from the group consisting of SEQ ID NOS: 14-30, 45, 47, 49, AND 51, 208, 677, 860, and 862.

[0041] The methods of the invention also include methods for the treatment of disorders related to lymphatic endothelial cells as recited above which may involve the administration of such compounds to individuals exhibiting symptoms or tendencies related to such disorders.

[0042] In another aspect, the invention provides a method of treating hereditary lymphedema, comprising: (a) identifying a human subject with hereditary lymphedema and with a mutation that alters the encoded amino acid sequence of at least one polypeptide of the human subject, relative to the amino acid sequence of a polypeptide comprising an amino acid sequence selected from the group consisting of SEQ ID NOS: 31-44, 46, 48, 50, 52, 54, 207, 676, 859, and 861; and (b) administering to the subject a lymphatic growth factor selected from the group consisting of a VEGF-C polynucleotide, a VEGF-C polypeptide, a VEGF-D polynucleotide, and a VEGF-D polypeptide.

[0043] The invention also provides a method of treating hereditary lymphedema comprising: identifying a human subject with lymphedema and with a mutation in at least one allele of a gene encoding a LEC protein identified in Table 3, wherein the mutation correlates with lymphedema in human subjects, and with the proviso that the LEC protein is not VEGFR-3; and administering to the subject a composition comprising a lymphatic growth agent selected from the group consisting of VEGF-C polypeptides, VEGF-D polypeptides, VEGF-C polynucleotides, and VEGF-D polynucleotides. The invention also comprehends use of a lymphatic growth agent selected from the group consisting of VEGF-C polypeptides, VEGF-D polypeptides, VEGF-C polynucleotides, and VEGF-D polynucleotides in the manufacture of a medicament for the treatment of hereditary lymphedema resulting from a mutation in a LEC gene identified in Table 3, with the proviso that the gene is not VEGFR-3.

[0044] In addition, the invention encompasses methods for treating such diseases or disorders by administering compounds and other substances that modulate the overall activity of the target gene products. Compounds and other substances can effect such modulation either at the level of target gene expression or target protein activity. These treatment methods include the administration of a polypeptide or a polynucleotide according to the invention to an endothelial cell, e.g., a LEC and/or a BEC, or to an organism such as a human patient. An exemplary method according to this aspect of the invention is the administration of a therapeutic selected from the group consisting of an antisense polynucleotide capable of modulating the expression of at least one polynucleotide according to the invention, a polypeptide according to the invention, a polynucleotide according to the invention, an antibody or antibody fragment specifically recognizing a polypeptide according to the invention, a VEGF-C polynucleotide, a VEGF-C polypeptide, a VEGF-D polynucleotide, a VEGF-D polypeptide and a soluble VEGFR-3 polypeptide.

[0045] In another aspect, the invention provides a method of screening for an endothelial cell disorder or predisposition to the disorder, comprising obtaining a biological sample containing endothelial cell mRNA from a human subject; and measuring expression of a BEC or LEC gene from the amount of mRNA in the sample transcribed from the gene, wherein the BEC or LEC gene encodes a polypeptide identified in Table 3 or 4.

[0046] The invention relates to a method of inhibiting the growth of a lymphatic endothelial cell, the method comprising contacting the cell with a composition comprising at least one antibody conjugated to an agent capable of inhibiting the growth, wherein the agent is selected from the group consisting of a cytotoxic agent and a cytostatic agent, and wherein the antibody specifically binds to a polypeptide encoded by a polynucleotide comprising a sequence selected from the group consisting of SEQ ID NOS:14-17, 45, 47, 860 and 862. In specific embodiments of this method, the polypeptide comprises an amino acid sequence selected from the group consisting of SEQ ED NOS:31-34, 46, 48, 859 and 861.

[0047] The invention further relates to methods of detecting a lymphatic endothelial cell, the method comprising contacting the cell with a composition comprising at least one antibody conjugated to a detectable agent, such as a fluorescent molecule or a radiolabeled molecule. In specific embodiments, the antibody specifically binds to a polypeptide encoded by a polynucleotide comprising a sequence selected from the group consisting of SEQ ID NOS: 14-17, 45, 47, 860 and 862. In further specific embodiments of this method, the polypeptide comprises an amino acid sequence selected from the group consisting of SEQ ID NOS: 31-34, 46, 48, 859 and 861.

[0048] The invention still further relates to methods of isolating a lymphatic endothelial cell, comprising contacting the cell with a solid matrix comprising at least one antibody capable of binding to a transmembrane protein in the cell membrane of the cell, and isolating cells specifically bound to the antibody matrix. In specific embodiments, the antibody specifically binds to a polypeptide encoded by a polynucleotide comprising a sequence selected from the group consisting of SEQ ID NOS:14-17, 45, 47, 860 and 862. In further specific embodiments of this method, the polypeptide comprises an amino acid sequence selected from the group consisting of SEQ ID NOS:31-34, 46, 48, 859 and 861.

[0049] The invention also relates to the administration of an agonist or antagonist to a lymphatic endothelial cell, comprising selecting an antibody, a peptide or a small molecular weight compound that is capable of specifically binding to a lymphatic endothelial cell-specific protein, wherein the antibody, peptide or small molecular weight compound is an agonist or antagonist for a growth factor receptor, a cytokine receptor, a chemokine receptor, or a hemopoietic receptor, and contacting the antibody, peptide or small molecular weight compound with the lymphatic endothelial cell in need of growth stimulation or inhibition. In specific embodiments, such lymphatic endothelial cells are involved in lymphedema, lymphangioma, lymphangiomyeloma, lymphangiomatosis, lymphangiectasis, lymphosarcoma, and lymphangioscierosis.

[0050] The invention also relates to the administration of a cytotoxic or cytostatic drug to a lymphatic endothelial cell, comprising selecting an antibody, a peptide or a small molecular weight compound that is capable of specifically binding to a lymphatic endothelial cell-specific protein, wherein the antibody, peptide or small molecular weight compound is complexed to the cytotoxic or cytostatic drug. In specific embodiments, administration of such complexes is useful in the treatment of malignant tumor diseases prone to metastatic spread through the lymphatic system.

[0051] The invention also provides a method of monitoring the efficacy or toxicity of a drug on endothelial cells, comprising steps of measuring expression of at least one BEC or LEC gene in endothelial cells of a mammalian subject before and after administering a drug to the subject, wherein the at least one BEC or LEC gene encodes a polypeptide set forth in Table 3 or Table 4, and wherein changes in expression of the BEC or LEC gene correlates with efficacy or toxicity of the drug on endothelial cells.

[0052] The invention relates to a lymphatic endothelial cell marker protein comprising a polypeptide encoded by a polynucleotide selected from the group consisting of SEQ ID NOS:14-17; and a polynucleotide hybridizable under stringent conditions with any one of SEQ ID NOS:14-17. In specific embodiments, the lymphatic endothelial cell marker protein comprises a polypeptide selected from the group consisting of SEQ ID NOS:3 1-34.

[0053] The invention also relates to an antibody capable of specifically binding to a lymphatic endothelial cell marker protein comprising a polypeptide selected from the group consisting of SEQ ID NOS:31-34.

[0054] The invention further relates to a method of detecting a lymphatic endothelial cell, comprising contacting said cell with the antibody wherein said antibody is detectably labeled.

[0055] The invention still further relates to a method of inhibiting at least one biological activity of a lymphatic endothelial cell, comprising contacting the cell with an agent capable of binding to at least one polypeptide encoded by any one of SEQ ID NOS:14-17, 45, 47, 860 and 862, wherein the activity of the polypeptide is reduced relative to the activity of a polypeptide that is not contacted with the agent.

[0056] The invention also relates to a method of inhibiting the growth of a lymphatic endothelial cell, the method comprising contacting the cell with an antisense oligonucleotide capable of specifically binding to at least one polynucleotide selected from the group consisting of SEQ ID NOS:1-30, 45, 47, 860 and 862. In a specific embodiment, the antisense oligonucleotide consists essentially of about 12 to about 25 contiguous nucleotides of any one of SEQ ID NOS: 1-30, 45, 47, 860 and 862.

[0057] Additional features and variations of the invention will be apparent to those skilled in the art from the entirety of this application, and all such features are intended as aspects of the invention.

### BRIEF DESCRIPTION OF THE SEVERAL VIEWS OF THE DRAWINGS

[0058] FIG. 1: Examples of differentially expressed genes in LECs and BECs. Northern blotting and hybridization for the indicated transcripts. Equal loading was verified by probing with GAPDH. For the microarray analyses, RNA was extracted from LECs which were cultured in the presence of VEGF-C (LEC/+C). When validating the array results, RNA was extracted as a control also from cultures of LECs in which VEGF-C was not added (LEC/−C).

[0059] FIG. 2: Cytoskeletal structures, cadherin complexes and integrin α9 expression in BECs and LECs. Mixed cultures of LEC and BEC were double-stained for N-cadherin (a), VE-cadherin (c), β-catenin (e), plakoglobin (g), F-actin (i) and integrin α9 (k), and for the LEC-specific marker podoplanin (green; b, d, f, h, j, l). Expression of integrin α9 in the lymphatic (arrow) but not in blood vessel endothelia (arrowhead). Adjacent sections of human skin were stained with antibodies against integrin α9 (m), VEGFR-3 (n) or blood vessel endothelial antigen PAL-E (o).

### DETAILED DESCRIPTION OF THE INVENTION

[0060] A major role of the lymphatic vasculature is to remove an excess of the protein-rich interstitial fluid that continuously escapes from the blood capillaries, and to return it to the blood circulation (Witte, M. H., et al., Microsc. Res. Tech. 55:122-145. 2001; Karpanen, T., et al., J. Exp. Med. 194:F37-F42. 2001; Karkkainen, M. J., et al., Trends Mol. Med. 7:18-22. 2001). In addition, the lymphatic system provides constant immune surveillance by filtering lymph and its antigens through the chain of lymph nodes, and also serves as one of the major routes for absorption of lipids from the gut. It has been known for a long time-that in many types of cancer the lymphatic vessels provide a major pathway for tumor metastasis, and regional lymph node dissemination correlates with the progression of the disease. Hereditary lymphedema, post-surgical secondary lymphedema and lymphatic obstruction in filariasis, are all characterized by disabling and disfiguring swelling of the affected areas, linked to the insufficiency or obstruction of the lymphatics. Witte, M. J., et al., Microsc. Res. Tech 55:122-145 (2001).

[0061] In spite of the importance of lymphatic vessels in medicine, the cell biology of this part of the vascular system has received little attention until recently. Studies during the past four years have uncovered the existence of the lymphatic specific vascular endothelial growth factors VEGF-C and VEGF-D, which serve as ligands for the receptor tyrosine kinase VEGFR-3, and demonstrated their importance for the normal development of the lymphatic vessels (See, Jeltsch, M., et al., Science 276:1423-1425 (1997); Veikkola, T., et al., EMBO J. 20:1223-1231 (2001); Mäkinen, T., et al., Nat. Med. 7:199-205 (2001)). These molecules also appear to be involved in the development of lymphedema and lymphatic metastasis (Karpanen, T., et al., J. Exp. Med. 194:F37-F42 (2001); Karkkainen, M. J., et al., Trends Mol. Med. 7:18-22. 2001).

[0062] The growth factor Vascular Endothelial Growth Factor C (VEGF-C), as well as native human, non-human mammalian, and avian polynucleotide sequences encoding VEGF-C, and VEGF-C variants and analogs, have been described in detail in International Patent Application Number PCT/US98/01973, filed Feb. 2, 1998 and published on Aug. 6, 1998 as International Publication Number WO 98/33917; in Joukov et al., J. Biol. Chem., 273(12): 6599-6602 (1998); and in Joukov et al., EMBO J., 16(13): 3898-3911 (1997), all of which are incorporated herein by reference in their entirety. As explained therein in detail, human VEGF-C (SEQ ID NO: 863) is initially produced in human cells as a prepro-VEGF-C polypeptide of 419 amino acids. A cDNA encoding human VEGF-C (SEQ ID NO: 864) has been deposited with the American Type Culture Collection (ATCC), 10801 University Blvd., Manassas, Va. 20110-2209 (USA), pursuant to the provisions of the Budapest Treaty (Deposit date of 24 Jul. 1995 and ATCC Accession Number 97231). VEGF-C sequences from other species also have been reported. See Genbank Accession Nos. MMU73620 (Mus musculus); and CCY15837 (Coturnix coturnix) for example, incorporated herein by reference.

[0063] The prepro-VEGF-C polypeptide is processed in multiple stages to produce a mature and most active VEGF-C polypeptide of about 21-23 kD, as assessed by SDS-PAGE under reducing conditions (SEQ ID NO: 863). Such processing includes cleavage of a signal peptide (residues 1-31); cleavage of a carboxyl-terminal peptide (corresponding approximately to amino acids 228-419 and having a pattern of spaced Cysteine residues reminiscent of a Balbiani ring 3 protein (BR3P) sequence [Dignam et al., Gene, 88:133-40 (1990); Paulsson et al., J. Mol. Biol., 211:331-49 (1990)]) to produce a partially-processed form of about 29 kD; and cleavage (apparently extracellularly) of an amino-terminal peptide (corresponding approximately to amino acids 32-103) to produced a fully-processed mature form of about 21-23 kD. Experimental evidence demonstrates that partially-processed forms of VEGF-C (e.g., the 29 kD form) are able to bind VEGFR-3 (Flt4 receptor), whereas high affinity binding to VEGFR-2 occurs only with the fully processed forms of VEGF-C. It appears that VEGF-C polypeptides naturally associate as non-disulfide linked dimers.

[0064] It has been demonstrated that amino acids 103-227 of VEGF-C are not all critical for maintaining VEGF-C functions. A polypeptide consisting of amino acids 113-213 (and lacking residues 103-112 and 214-227) retains the ability to bind and stimulate VEGF-C receptors, and it is expected that a polypeptide spanning from about residue 131 to about residue 211 will retain VEGF-C biological activity. The Cysteine residue at position 156 has been shown to be important for VEGFR-2 binding ability. However, VEGF-C ΔC₁₅₆ polypeptides (i.e., analogs that lack this Cysteine due to deletion or substitution) remain potent activators of VEGFR-3. The Cysteine at position 165 of VEGF-C polypeptide is essential for binding either receptor, whereas analogs lacking the Cysteine at positions 83 or 137 compete with native VEGF-C for binding with both receptors and stimulate both receptors.

[0065] VEGF-D is structurally and functionally most closely related to VEGF-C [see U.S. Pat. No. 6,235,713 and International Patent Publ. No. WO 98/07832, incorporated herein by reference]. See SEQ ID NO: 866 for the polynucleotide sequence of VEGF-D; the encoded amino acid sequence is set forth in SEQ ID NO: 865. Like VEGF-C, VEGF-D is initially expressed as a prepro-peptide that undergoes N-terminal and C-terminal proteolytic processing, and forms non-covalently linked dimers. VEGF-D stimulates mitogenic responses in endothelial cells in vitro. During embryogenesis, VEGF-D is expressed in a complex temporal and spatial pattern, and its expression persists in the heart, lung, and skeletal muscles in adults. Isolation of a biologically active fragment of VEGF-D designated VEGF-DΔNΔC, is described in International Patent Publication No. WO 98/07832, incorporated herein by reference. VEGF-DΔNΔC consists of amino acid residues 93 to 201 of VEGF-D (SEQ ID NO: 26) optionally linked to the affinity tag peptide FLAG®, or other sequences.

[0066] The prepro-VEGF-D polypeptide has a putative signal peptide of 21 amino acids and is apparently proteolytically processed in a manner analogous to the processing of prepro-VEGF-C. A “recombinantly matured” VEGF-D lacking residues 1-92 and 202-354 retains the ability to activate receptors VEGFR-2 and VEGFR-3, and appears to associate as non-covalently linked dimers. Thus, preferred VEGF-D polynucleotides include those polynucleotides that comprise a nucleotide sequence encoding amino acids 93-201. The guidance provided above for introducing function-preserving modifications into VEGF-C polypeptides is also suitable for introducing function-preserving modifications into VEGF-D polypeptides. As another aspect of the invention, practice of the invention methods is contemplated wherein VEGF-D polypeptides are employed in lieu of VEGF-C polypeptides.

[0067] When compared with the blood vascular endothelium, the lymphatic endothelium exhibits specific morphological and molecular characteristics. For example, the lymphatic capillaries are larger than blood capillaries, they have an irregular or collapsed lumen with no red blood cells, a discontinuous basal lamina, overlapping intercellular junctional complexes and anchoring filaments that connect the lymphatic endothelial cells to the extracellular matrix (Witte, M. H., et al., Microsc. Res. Tech. 55:122-145 (2001)). Unlike the blood capillaries, the lymphatic capillaries lack pericyte coverage. At the molecular level several lymphatic specific markers have been identified, including VEGFR-3, the Prox-1 transcription factor, the hyaluronan receptor LYVE-1, the membrane mucoprotein podoplanin, the beta-chemokine receptor D6, the cytoskeletal proteins desmoplakin I and II and the macrophage mannose receptor I (Wigle, J. T. & Oliver, G, Cell 98:769-778 (1999); Banedji, S., et al., J. Cell Biol. 144:789-801 (1999): Breiteneder-Geleff, S., et al., Am. J. Pathol. 154:385-394 (1999): Nibbs, R. J., et al., Am. J. Pathol. 158:867-877 (2001); Ebata, N., et al., Microvasc. Res. 61:40-48. (2001); Irjala, H., et al., J. Exp. Med. 194:1033-1041 (2001)). The present invention relates to the genetic identity of lymphatic capillary endothelial cells versus blood vascular endothelial cells using a gene profiling approach.

[0068] “Stringent hybridization conditions” or “stringent conditions” refer to conditions under which a nucleic acid such as an oligonucleotide will specifically hybridize to its target sequence. Stringent conditions are sequence-dependent and will be different in different circumstances. Longer nucleic acids hybridize specifically at higher temperatures than shorter sequences. Generally, stringent conditions are selected to be about 5° C. lower than the thermal melting point (Tₘ) for the specific sequence at a defined ionic strength and pH. The Tₘ is the temperature (under defined ionic strength, pH and nucleic acid concentration conditions) at which 50% of the nucleic acids complementary to the target sequence hybridize to the target sequence at equilibrium. The term “complementary” refers to standard Watson-Crick base pairing between nucleotides of two nucleic acid molecules. Typically, stringent conditions will be those in which the salt concentration is less than about 1.0 M sodium ion, typically about 0.01 to 1.0 M sodium ion (or other salts) at pH 7.0 to 8.3 and at a temperature that is at least about 30° C. for short probes, primers or oligonucleotides (e.g., 10. to 50 nucleotides) and at least about 60° C. for longer probes, primers or oligonucleotides. Stringent conditions also can be achieved with the addition of destabilizing agents, such as formamide, as is known in the art Exemplary stringent hybridization conditions are hybridization at 42° C. for 20 hours in a solution containing 50% forrnamide, 5×SSPE, 5× Denhardt's solution, 0.1% SDS and 0.1 mg/ml denatured salmon sperm DNA, with a wash in 1×SSC, 0.1% SDS for 30 minutes at 65° C.

[0069] According to the invention, distinct gene expression profiles for blood vascular and lymphatic endothelial cells have been discovered. These results provide new insights into the phenotypic diversity of endothelial cells and reveal new potential lymphatic endothelial molecules, some of which could provide important targets for the therapy of diseases characterized by abnormal angiogenesis or lymphangiogenesis.

[0070] Differences in the expression of genes encoding proteins involved in inflammatory processes were found, as well as in those mediating cell-cell and cell-matrix interactions. Furthermore, several previously unknown genes were identified in the context of endothelial cell biology, which were differentially expressed in the two cell lineages. Several of the genes were originally cloned from neural tissues, including genes involved in the uptake of synaptic macromolecules and in synapse formation and remodeling (neuronal pentraxins I and II (Kirkpatrick, L. L., et al., J. Biol. Chem.. 275:17786-17792. 2000), in the trafficking of synaptic vesicles (NAP-22 (Yamamoto, Y., et al., Neurosci. Lett. 224:127-130. 1997), piccolo (Fenster, S. D., et al., Neuron 25:203-214 (2000)) and in the axon growth and guidance (Nr-CAM (Grumet, M., Cell Tissue Res. 290:423-428 (1997), reelin (Rice, D. S. & Curran, T., Annu. Rev. Neurosci. 24:1005-1039 (2001)).

[0071] In addition, the LECs especially expressed a number of as yet uncharacterized genes, which were originally cloned and highly expressed in nervous tissues (KIAA genes (Kikuno, R., et al., Nucleic Acids Res. 30:166-168. 2002). The gene expression profiling data disclosed herein therefore support the view that the same molecular mechanisms that are involved in governing neural cell positioning, in guiding axonal growth cones to their specific targets and in synaptogenesis may also be commonly used in the development of the vascular system and in the establishment of BEC and LEC identity. Some other signaling molecules first described in the developing nervous system have already been implicated in the development of the vasculature and vice versa (Shima and Mailhos, Curr. Opin. Genet. Dev. 10:536-542 (2000); Oosthuyse, et al., Nat. Genet. 28:131-138 (2001); Sondell, et al., Eur. J. Neurosci. 12:4243-4254 (2000)).

[0072] In the LECs, expression of several genes previously shown to be expressed in smooth muscle cells (SMCs) and pericytes was observed, such as matrix Gla, a mineral binding extracellular matrix protein involved in the inhibition of vascular and tissue calcification (Luo, G, et al., Nature 386:78-81 (1997)), monoamine oxidase A, the main degradative enzyme of monoamine hormones and neurotransmitters (Rodriguez, M. J., et al., Cell Tissue Res. 304:215-220 (2001)), integrin α9 (Palmer, E. L., et al., J. Cell Biol. 123:1289-1297 (1993)) and apolipoprotein D (Hu, C. Y, et al., J. Neurocytol. 30:209-218 (2001)). Some similarity of gene expression patterns between LECs and SMCs could be related to the lack of SMC around lymphatic capillaries. Instead, LECs may carry out some SMC functions by themselves. For example, lymph flow is maintained due to the intrinsic contractility of the LECs (Witte, M. H., et al., Microsc. Res. Tech. 55:122-145 (2001)), reminiscent of the ability of vascular SMCs to contract.

[0073] Molecular discrimination of the lymphatic and blood vessels is essential in studies of diseases involving the blood and/or lymphatic vessels and in the targeted treatment of such diseases. To date, several lymphatic endothelial specific markers have been identified, but some of them are expressed only in a subset of the lymphatic vessels, while others also occur in some blood vessel endothelia or in other cell types and their expression patterns may change in pathological conditions (for example, VEGFR-3 (Valtola, R., et al., Am. J. Pathol. 154:1381-1390. 1999)). Identification of new vascular markers according to the invention should provide a more reliable analysis of the blood and lymphatic vessels in pathological situations and eventually better diagnosis and treatment. Furthermore, inhibition of the function of certain molecules involved in the regulation of angiogenesis and/or lymphangiogenesis is known to prevent tumor growth and metastasis, and stimulation of the growth of blood or lymphatic vessels has been shown to be beneficial in several pathological conditions. Thus the BEC and LEC specific molecular regulators identified according to the invention may provide new targets for the treatment of diseases characterized by abnormal angiogenesis and lymphangiogenesis.

[0074] Several of the new LEC genes encode transmembrane proteins that may be specific molecular markers for lymphatic endothelial cells (Table 6). These genes and encoded proteins are useful for targeted treatment of diseases that involve lymphatic vessels. They may also be useful for preparing antibodies, as antibodies against LEC-specific proteins can be used to discriminate between blood and lymphatic vessels in pathological and physiological situations. Antibodies may also be useful for the isolation of lymphatic endothelial cells. These proteins may also play a role in the regulation of lymphangiogenesis, and can provide new candidate genes for diseases that involve lymphatic vessels, such as lymphedema.

[0075] The lymphatic endothelial cell specific surface molecules can be used for molecular drug targeting with antibodies, peptides and small-molecular weight compounds, which can act as agonists or antagonists for growth factor receptor, cyto- and chemokine receptor, and hemopoietin receptor signaling, cell adhesion and cell interaction with extracellular matrix or with other cell surface molecules. Such molecules can also be used for targeting of cytotoxic or cytostatic drugs into the lymphatic endothelial cells and for the attachment of electron-dense, radio-opaque or radioactive markers for imaging of disease processes associated with the lymphatic vessels. Such diseases include lymphedema, lymphangioma, lymphangiomyoma, lymphangiomatosis, lymphangiectasis, lymphosarcoma and lymphangiosclerosis.

[0076] The lymphatic endothelial cell surface molecules may be used for targeting of gene therapy for example by antibody-coated liposomes (containing proteins or genes as cargo) or by viral transducing vectors such as adenoviruses, adeno-associated viruses or lentiviruses having modified capsid/envelope proteins. The manipulation of lymphatic endothelial cell specific molecules may be applicable to treatment of disease processes associated with tissue edema by increasing fluid transport across the lymphatic vessel wall for example by modulating endothelial cell-cell or cell-matrix interactions or via stimulating transendothelial transport. Targeting of the lymphatic endothelial cells for example with cytotoxic or cytostatic compounds is contemplated to be valuable in malignant tumor diseases prone to metastatic spread via the lymphatic system.

[0077] The lymphatic endothelial cell molecules may allow the improved in vitro growth of lymphatic endothelial cells as well as in vitro tissue engineering of lymphatic vessels for use in diseases where the lymphatics have been damaged, such as after surgery and in various forms of lymphedema. Ligands of the cell surface proteins may further be applied to coat various polymeric matrices for the adhesion of cells in, e.g., bioimplants.

[0078] The lymphatic endothelial-cell-specific molecules such as surface molecules can provide important tools for the modulation of inflammatory, autoimmune and infectious processes involving leukocyte migration and immune recognition as well as the stimulation of secondary immune responses. Such processes include the migration of antigen presenting cells into the lymphatic system including lymph nodes as well as fransendothelial cell trafficking of lymphocytes and other leukocyte subclasses and the homing, survival and function of the various classes of leukocytes.

[0079] These molecules may allow one to modulate the metabolism of fatty acids including fatty acid/chylomicron absorption from the gut and regulation of fat accumulation in adipose tissue in various organs such as in the subcutaneous tissue and in the arterial wall.

[0080] Lymphatic endothelial-cell-specific molecules may further allow one to modulate the metabolism of fatty acids including fatty acid/chylomicron absorption from the gut and regulation of fat accumulation in adipose tissue in various organs such as in the skin subcutaneous tissue and in the arterial wall.

[0081] The lymphatic-cell-specific transmembrane proteins are expected to function in cell adhesion (e.g., adhesion between lymphatic endothelial cell-lymphatic endothelial cell, lymphatic endothelial cell-smooth muscle cell, lymphatic endothelial cell-immune system cell such as lymphocyte or dendritic cell), cell-extracellular matrix contacts, or as receptors such as growth factor, cytokine, chemokine or microbial receptors or ion channels. The transmembrane proteins connect to intracellular molecules that can induce cell growth, cell migration, cell apoptosis, cell differentiation or cell adhesion or other cellular functions specific for endothelial cells such as expression of adhesion receptors for leukocytes, release of nitric oxide, antigoagulant proteins, uptake of fluid and proteins from surrounding tissues and fat from gut or adipose tissues. TM proteins with short intracellular domains can function as auxiliary receptors in complex with other TM proteins.

[0082] The transmembrane proteins and their intracellular binding partner molecules can be used as molecular markers for lymphatic endothelial cells in normal and disease conditions, and to discriminate between blood and lymphatic vessels in pathological and physiological situations.

[0083] Antibodies against lymphatic specific transmembrane proteins, as well as peptides and small molecular compounds binding to extracellular domains of lymphatic-specific TM proteins can be used for the attachment of electron-dense, radio-opaque or radioactive markers for imaging of disease processes associated with the lymphatic vessels. Such diseases include lymphedema, lymphangioma, lymphangiomyoma, lymphangiomatosis, lymphangiectasis, lymphosarcoma and lymphangiosclerosis. Similarly, the lymphatic vessels can be visualized, e.g., during therapy of patients suffering from insufficient lymphatic growth, such as in lymphedema, or alternatively during treatment aiming to prevent lymphatic growth, e.g., in tumors, thereby facilitating the monitoring of the therapeutic method of the invention.

[0084] Antibodies against LEC-specific TM proteins are also expected to be useful for the isolation of lymphatic endothelial cells.

[0085] Antibodies against lymphatic-specific transmembrane proteins, or peptides or small-molecule compounds binding to the extracellular domain of lymphatic-specific TM proteins are expected to be useful in targeting drug delivery to lymphatic endothelial cells, e.g., by coupling an antibody, peptide or small-molecule compound to a cytotoxic or cytostatic compound. Such coupled compounds are useful as therapeutics in the treatment of malignant tumor diseases prone to metastatic spread via the lymphatic system, as well as in ameliorating a symptom associated with any such disease. The antibodies, peptides or small-molecule compounds can also be coupled to stimulatory lymphatic endothelial molecules such as growth factors, cytokines and chemokines to promote stimulation.

[0086] Additionally, antibodies against lymphatic-specific TM proteins or peptides, or small-molecule compounds binding to the extracellular domain of lymphatic-specific TM proteins, may be used for targeting of gene therapy, for example, by antibody-coated liposomes (containing proteins, genes or other molecules as cargo) or by viral transducing vectors such as adenoviruses, adeno-associated viruses, lentiviruses, or the like, having modified capsid/envelope proteins. The manipulation of lymphatic endothelial-cell-specific molecules are expected to be applicable to the treatment of disease processes associated with tissue edema due to the relative absence, or relative dysfunction, of lymphatic vessels, which can result from an infection, surgery, radiotherapy or a genetic defect by increasing fluid transport across the lymphatic vessel wall, for example by modulating endothelial cell-cell or cell-matrix interactions or by stimulating transendothelial transport.

[0087] The lymphatic endothelial cell molecules are expected to improve the in vitro growth of lymphatic endothelial cells, as well as the in vitro tissue engineering of lymphatic vessels for use in treating disorders or diseases where the lymphatics have been damaged, such as after surgery, in various forms of lymphedema, and in other applications as described herein. Ligands of the cell-surface proteins may further be applied as a coating to various polymeric matrices for the adhesion of cells in, e.g., bioimplants.

[0088] Inflammatory, autoimmune and infectious processes involving leukocyte migration and immune recognition, such as migration of antigen-presenting cells into the lymphatic system, including lymph nodes, as well as transendothelial cell trafficking of lymphocytes and other leukocyte subclasses and the homing, survival and function of the various classes of leukocytes can be modulated by targeting endothelial-cell-specific TM proteins, which mediate these cell adhesion processes.

[0089] Upregulation of lymphatic-specific genes in, e.g., cancer are expected to be useful as diagnostic markers, and monitoring such upregulated expression with an antibody against a lymphatic endothelial-cell-specific protein, e.g., by immunostaining of tissue(s) or by using a probe hybridizable to a lymphatic endothelial-cell-specific mRNA, e.g., under stringent hybridization conditions as described herein, is contemplated.

[0090] Lymphatic endothelial-cell-specific transcription factors are expected to be useful for the differentiation of lymphatic endothelial cells from embryonic stem cells, endothelial precursor cells, or blood vascular endothelial cells.

[0091] The lymphatic endothelial transcription factors are expected to improve the in vitro growth of lymphatic endothelial cells, as well as to facilitate in vitro tissue engineering of lymphatic vessels for use in treating disorders or diseases where the lymphatics have been damaged, such as after surgery, in various forms of lymphedemna, and in other applications disclosed herein.

[0092] Intracellular signaling proteins participating in signaling pathways regulating lymphatic endothelial cell proliferation, differentiation, apoptosis, migration or adhesion are expected to be useful targets for small-molecule compounds inhibiting these signaling events, and cellular functions dependent on such signaling. Signaling proteins are also expected to participate in VEGFR-3 signaling pathways, and will be useful in modulating cellular activities controlled, at least in part, by VEGFR-3 signaling, such as lymphangiogenesis.

[0093] The lymphatic endothelial cell molecules are expected to improve the in vitro growth of lymphatic endothelial cells as well as in vitro tissue engineering of lymphatic vessels for use in treating diseases or disorders where the lymphatics have been damaged, such as after surgery, in various forms of lymphedema, and in other applications as described herein.

[0094] Lymphatic-specific transcription factors are also expected to be useful in modulating gene expression in endothelial cells to induce the expression of other lymphatic-specific genes in, for example, blood vascular endothelial cells or endothelial precursor cells.

[0095] Lymphatic-specific gene transcripts are expected to provide useful targets for RNA interference (RNAi)-induced inhibition of expression. RNAi technology is expected to be useful in the methods according to the invention, such as therapeutic methods effective in treating hyper- and hypo-proliferative endothelial-cell-associated diseases and disorders, as well as methods of ameliorating a symptom of any such disease or disorder. RNAi methodologies are known in the art and known RNAi technologies are contemplated as useful in various aspects of the invention. See Fire et al., Nature 391:806-811. (1998) and Sharp, P., Genes and Dev. 13:139-141. (1999), each of which is incorporated herein by reference. It is preferred that RNAi compounds be double-stranded RNA molecules corresponding to part or all of a coding region of a desired target for expression.

[0096] As noted, several of the new LEC genes encode transcription factors, which may control cellular fate (iroquois-related homeobox gene), and may have an important role in the differentiation of lymphatic endothelial cells. Transcription factors disclosed herein may control transcription of genes involved for example in the proliferation of lymphatic endothelial cells, and may be important molecular regulators of lymphatic growth (Table 5). Lymphatic endothelial cell specific transcription factors can be used for the differentiation of lymphatic endothelial cells from embryonic stem cells, endothelial precursor cells or from blood vascular endothelial cells.

[0097] The lymphatic endothelial transcription factors may allow the improved in vitro growth of lymphatic endothelial cells as well as in vitro tissue engineering of lymphatic vessels for use in diseases where the lymphatics have been damaged, such as after surgery and in various forms of lymphedema.

Polynucleotides of the Invention

[0098] In general, the isolated polynucleotides of the invention include the LEC and BEC polynucleotides exhibiting differential expression and identified in Tables 3, 4, 14, 15 and 16. The sequences of these polynucleoides are provided in Table 16, associated with their known database accession numbers, where applicable. In Tables 14 and 15, these accession numbers are correlated with unique sequence identifiers, thus permitting identification by sequence identifier of each citation to an accession number. The polynuleotide sequences may include a coding region and may include non-coding flanking sequences, which are readily identifiable by one of skill in the art. The invention contemplates polynucleotides comprising part, or all, of a coding region, with or without flanking regions, e.g., poly A sequences, 5′ non-coding sequences, and the like. The polynucleotides of the present invention also include, but are not limited to, a polynucleotide that hybridizes to the complement of the nucleotide sequence of any one of SEQ ID NOS: 1-30, 45, 47, 49 and 51 under highly stringent hybridization conditions; a polynucleotide that hybridizes to the complement of the nucleotide sequence of any one of SEQ ID NOS: 1-30, 45, 47, 49 and 51 under moderately stringent hybridization conditions; a polynucleotide which is an allelic variant of any polynucleotide recited above; a polynucleotide which encodes a species homologue of any of the proteins recited above; or a polynucleotide that encodes a polypeptide comprising a specific domain or truncation of the polypeptide of any one of SEQ ID NOS: 31-44, 46, 48, 50 and 52. Such polynucleotides hybridize under the above conditions to the complement of any one of SEQ ID NOS: 1-30, 45, 47,49 and 51 or to a fragment of any one of SEQ ID NOS: 1-30, 45, 47, 49 and 51 wherein the fragment is greater than at least about 10 bp, and, in alternate embodiments, is about 20 to about 50 bp, or is greater than about 100 bp, 200 bp, 300 bp, 400 bp, 500 bp, 600 bp, 700 bp, or 800 bp, where appropriate.

[0099] The polynucleotides of the invention also provide polynucleotides that are variants of the polynucleotides recited above. Typically, such a variant sequence varies from one of those listed herein by no more than about 20%, ie., the number of individual nucleotide substitutions, additions, and/or deletions in a similar sequence, as compared to the corresponding reference sequence, divided by the total number of nucleotides in the variant sequence is about 0.2 or less. Such a sequence is said to have 80% sequence identity to the listed sequence. Such a variant sequence can be routinely identified by applying the foregoing algorithm.

[0100] In one embodiment, a variant polynucleotide sequence of the invention varies from a listed sequence by no more than 10%, i.e., the number of individual nucleotide substitutions, additions, and/or deletions in a variant sequence, as compared to the corresponding reference sequence, divided by the total number of nucleotides in the variant sequence is about 0.1 or less. Such a sequence is said to have 90% sequence identity to the listed sequence. Such a variant sequence can be routinely identified by applying the foregoing algorithm.

[0101] In an alternate embodiment a variant sequence of the invention varies from a listed sequence by no more than by no more than 5%, i.e., the number of individual nucleotide substitutions, additions, and/or deletions in a variant sequence, as compared to the corresponding reference sequence, divided by the total number of nucleotides in the variant sequence is about 0.05 or less. Such a sequence is said to have 95% sequence identity to the listed sequence. Such a variant sequence can be routinely identified by applying the foregoing algorithm.

[0102] In yet another alternate embodiment, a variant sequence of the invention varies from a listed sequence by no more than 2%, ie., the number of individual nucleotide substitutions, additions, and/or deletions in a variant sequence, as compared to the corresponding reference sequence, divided by the total number of nucleotides in the variant sequence is about 0.02 or less. Such a sequence is said to have 98% sequence identity to the listed sequence. Such a variant sequence can be routinely identified.

[0103] A polynucleotide according to the invention can be joined to any of a variety of other nucleotide sequences by well-established recombinant DNA techniques (see Sambrook J et al. (2d Ed.; 1989) Molecular Cloning: A Laboratory Manual, Cold Spring Harbor Laboratory, Cold Spring Harbor, N.Y.). Useful nucleotide sequences for joining to polypeptides include an assortment of vectors, e.g., plasmids, cosmids, lambda phage derivatives, phagemids, and the like, that are well known in the art. Accordingly, the invention also provides a vector including a polynucleotide of the invention and a host cell containing the polynucleotide. In general, the vector contains an origin of replication functional in at least one organism, convenient restriction endonuclease sites, and a selectable marker for the host cell. Vectors according to the invention include expression vectors, replication vectors, probe generation vectors, sequencing vectors, and retroviral vectors. A host cell according to the invention can be a prokaryotic or eukaryotic cell and can be a unicellular organism or part of a multicellular organism. Large numbers of suitable vectors and promoters are known to those of skill in the art and are commercially available for generating the recombinant constructs of the present invention.

[0104] The sequences falling within the scope of the present invention are not limited to the specific sequences herein described, but also include allelic variations thereof. Allelic variations can be routinely determined by comparing the sequence provided in any one of SEQ ID NOS: 1-30, 45, 47, 49 and 51, a representative intermediate fragment thereof, or a nucleotide sequence at least 99.9% identical to any one of SEQ ID NOS: 1-30, 45, 47, 49 and 51 with a sequence from another isolate of the same species. Furthermore, to accommodate codon variability, the invention includes nucleic acid molecules coding for the same amino acid sequences as do the specific open reading frames (ORFs) disclosed herein. In other words, in the coding region of an ORF, substitution of one codon for another which encodes the same amino acid is expressly contemplated.

[0105] Unless provided for otherwise here, all terms are defined as is known in the art, for example as employed in U.S. Pat. No. 6,350,447, incorporated herein by reference.

[0106] Also contemplated are antisense polynucleotides based on the sequence of any of the LEC or BEC polynucleotides according to the invention. Such antisense polynucleotides are substantially complementary (e.g., at least 90% complementarity), and preferably perfectly complementary, to sequences of the polynucleotides of the invention, or fragments thereof, set out in the sequence listing, Tables 3, 4, 14-16, and throughout this disclosure that are differentially expressed in LECs and BECs. These polynucleotide sequences include any of SEQ ID NOS: 1-30, 45, 47, 49 and 51, or a fragment thereof comprising at least 10 contiguous nucleotides. Antisense nucleic acid comprises a nucleotide sequence that is complementary to a “sense” nucleic acid encoding a protein (e.g., complementary to the coding strand of a double-stranded cDNA molecule or complementary to an mRNA sequence). Methods for designing and optimizing antisense nucleotides are described in Lima et al., (J Biol Chem,; 272:626-38. 1997) and Kurreck et al., (Nucleic Acids Res.,; 30:1911-8. 2002). In one aspect, antisense nucleic acid molecules are provided that comprise a sequence complementary to at least about 10, 25, 50, 100, 250 or 500 nucleotides or an entire coding strand. An antisense nucleic acid of the invention can be constructed using chemical synthesis or enzymatic ligation reactions using procedures known in the art.

[0107] In one embodiment, an antisense nucleic acid molecule is antisense to a “coding region” of the coding strand of a nucleotide sequence encoding a polypeptide of the invention. The term “coding region” refers to the region of the nucleotide sequence comprising codons which are translated into amino acid residues. In another embodiment, the antisense nucleic acid molecule is antisense to a “conceding region” of the coding strand of a nucleotide sequence encoding the polynucleotide. The term “conceding region” refers to 5′ and 3′ sequences which flank the coding region that are not translated into amino acids (i.e., also referred to as 5′ and 3′ untranslated regions).

[0108] Antisense nucleic acids of the invention can be designed according to the rules of Watson and Crick or Hoogsteen base pairing. The antisense nucleic acid molecule can be complementary to the entire coding region of the mRNA of the polynucleotide of the invention, but more preferably is an oligonucleotide that is antisense to only a portion of the coding or noncoding region of the mRNA. An antisense oligonucleotide can be, for example, about 5, 10, 15, 20, 25, 30, 35, 40, 45, or 50 nucleotides in length. An antisense nucleic acid of the invention can be constructed using chemical synthesis or enzymatic ligation reactions using procedures known in the art. For example, an antisense nucleic acid (e.g., an antisense oligonucleotide) can be chemically synthesized using naturally occurring nucleotides or variously modified nucleotides designed to increase the biological stability of the molecules or to increase the physical stability of the duplex formed between the antisense and sense nucleic acids (e.g., phosphorothioate derivatives and acridine substituted nucleotides can be used).

[0109] The antisense nucleic acid molecules of the invention are typically administered to a subject or generated in situ such that they hybridize or bind to cellular mRNA and/or genomic DNA encoding the complementary polynucleotide, thereby inhibiting expression of the protein (e.g., by inhibiting transcription and/or translation). The hybridization can reflect conventional nucleotide complementarity to form a stable duplex, or, for example, in the case of an antisense nucleic acid molecule that binds to DNA duplexes, through specific interactions in the major groove of the double helix.

[0110] An example of a route of administration of antisense nucleic acid molecules of the invention includes direct injection at a tissue site. Alternatively, antisense nucleic acid molecules can be modified to target selected cells and then administered systemically. For example, for systemic administration, antisense molecules can be modified such that they specifically bind to receptors or antigens expressed on a selected cell surface (e.g., by linking the antisense nucleic acid molecules to peptides or antibodies that bind to cell surface receptors or antigens). Additional routes of antisense therapy may be used in the invention, e.g., topical administration, transdermal administration [reviewed by Brand in Curr Opin. Mol. Ther. 3.244-8. 2001] antisense administration using nanoparticulate systems [Lambert et al., Adv. Drug. Deliv. Rev. 47:99-112. 2001], or administration of antisense nucleotides conjugated with peptide [Juliano et al., Curr. Opin. Mol. Ther. 2:297-303. 2000].

[0111] The invention further contemplates use of the polynucleotides of the invention for gene therapy or in recombinant expression vectors which produce polynucleotides or polypeptides of the invention that can regulate an activity of LEC genes, and are useful in therapy of LEC disorders such as lymphedema. Delivery of a functional gene encoding a polypeptide of the invention to appropriate cells is effected ex vivo, in situ, or in vivo by use of vectors, including viral vectors (e.g., adenovirus, adeno-associated virus, or a retrovirus), or ex vivo by use of physical DNA transfer methods (e.g., liposomes or chemical treatments). See, for example,. Anderson, Nature, supplement to vol. 392, no. 6679, pp. 25-20 (1998). For additional reviews of gene therapy technology see Friedmann, (Science, 244: 1275-1281. 1989); Verma, (Scientific American: 263:68-72, 81-84. 1990); and Miller, (Nature, 357: 455-460. 1992). Introduction of any one of the nucleotides of the present invention or a gene encoding a polypeptide of the invention can also be accomplished with extrachromosomal substrates (transient expression) or artificial chromosomes (stable expression). Cells may also be cultured ex vivo in the presence of proteins of the present invention in order to proliferate or to produce a desired effect on, or activity in, such cells. In another embodiment, cells comprising vectors expressing the polynucleotides or polypeptides of the invention may be cultured ex vivo and administered to an individual in need of treatment for an LEC disease or disorder.

[0112] Given the foregoing disclosure of the nucleic acid constructs, it is possible to produce the gene product of any of the genes comprising the sequence of any of SEQ ID NOS: 1-30, 45, 47, 49 and 51 by routine recombinant DNA/RNA techniques. A variety of expression vector/host systems may be utilized to contain and express the coding sequence. These include, but are not limited to, microorganisms such as bacteria transformed with recombinant bacteriophage, plasmid, phagemid, or cosmid DNA expression vectors; yeast transformed with yeast expression vectors; insect cell systems infected with viral expression vectors (e.g., baculovirus); plant cell systems transfected with virus expression vectors (e.g., Cauliflower Mosaic Virus, CaMV; Tobacco Mosaic Virus, TMV) or transformed with bacterial expression vectors (e.g., Ti or pBR322 plasmid); or even animal cell systems. Mammalian cells that are useful in recombinant protein productions include, but are not limited to, VERO cells, HeLa cells, Chinese hamster ovary (CHO) cells, COS cells (such as COS-7), WI38, BHK, HepG2, 3T3, RIN, MDCK, A549, PC12, K562 and HEK 293 cells.

Polypeptides of the Invention

[0113] In general, the isolated LEC and BEC polypeptides of the invention are encoded by the above-described differentially expressed LEC and BEC polynuleotides of the invention. The sequences of the LEC and BEC polypeptides are provided in Table 16, associated with their known database accession numbers, where applicable. In Tables 14 and 15, these accession numbers are correlated with unique sequence identifiers, thus permitting identification by sequence idenfier of 4each citation to an accession number. The isolated polypeptides of the invention include, but are not limited to, a polypeptide comprising: the amino acid sequences set forth as any one of SEQ ID NOS.: 31-44, 46, 48, 50 and 52 or an amino acid sequence encoded by any one of the nucleotide sequences set forth in SEQ ID NOS.: 1-30, 45, 47, 49 and 51, or the corresponding full length or mature protein. The invention also provides biologically active or immunologically active variants of any of the amino acid sequences set forth as SEQ ID NOS.: 31-44, 46, 48, 50 and 52, or the corresponding full length or mature protein suitable variant polypeptides have sequences that are at least about 65%, at least about 70%, at least about 75%, at least about 80%, at least about 85%, 86%, 87%, 88%, 89%, at least about 90%, 91%, 92%, 93%, 94%, typically at least about 95%, 96%, 97%, more typically at least about 98%, or most typically at least about 99% amino acid identity, that retain biological activity. Fragments of the proteins of the present invention which comprise at least 10 contiguous amino acids of a sequence disclosed herein and that are capable of exhibiting a biological activity of the corresponding full length protein are also encompassed by the present invention.

[0114] The protein coding sequence is identified in the sequence listing by translation of the disclosed nucleotide sequences. The mature form of such protein may be obtained by expression of a full-length polynucleotide in a suitable mammalian cell or other host cell. The sequence of the mature form of the protein is also determinable from the amino acid sequence of the full-length form. Where proteins of the present invention are membrane bound, soluble forms of the proteins are also provided. In such forms, part or all of the regions causing the proteins to be membrane bound are deleted so that the proteins are capable of being fully secreted from the cell in which it is expressed.

[0115] A variety of methodologies known in the art can be utilized to obtain any one of the isolated polypeptides or proteins of the present invention. At the simplest level, the amino acid sequence can be synthesized using commercially available peptide synthesizers. The polypeptides and proteins of the present invention can alternatively be purified from cells which have been altered to express the desired polypeptide or protein. As used herein, a cell is said to be altered to express a desired polypeptide or protein when the cell, through genetic manipulation, is made to produce a polypeptide or protein which it normally does not produce or which the cell normally produces at a lower level. One skilled in the art can readily adapt procedures for introducing and expressing either recombinant or synthetic sequences into eukaryotic or prokaryotic cells in order to generate a cell which produces one of the polypeptides or proteins of the present invention.

[0116] A “fragment” of a polypeptide is meant to refer to any portion of the molecule, such as the peptide core, a variant of the peptide core, or an extracellular region of the polypeptide. A “variant” of a polypeptide is meant to refer to a molecule substantially similar in structure and biological activity to either the entire molecule, or to a fragment thereof Thus, provided that two molecules possess a similar activity, they are considered variants as that term is used herein even if the composition or secondary, tertiary, or quaternary structure of one of the molecules is not identical to that found in the other, or if the sequence of amino acid residues is not identical. An “analogue” of a polypeptide or genetic sequence is meant to refer to a protein or genetic sequence substantially similar in function and structure to the isolated polypeptide or genetic sequence.

[0117] It is understood herein that conservative amino acid substitutions can be performed to a purified and isolated polypeptide comprising any one of the sequences of SEQ ID NOS.: 31-44, 46, 48, 50 and 52 which are likely to result in a polypeptide that retains biological or immunological activity, especially if the number of such substitutions is small. By “conservative amino acid substitution” is meant substitution of an amino acid with an amino acid having a side chain of a similar chemical character. Similar amino acids for making conservative substitutions include those having an acidic side chain (glutamic acid, aspartic acid); a basic side chain (arginine, lysine, histidine); a polar amide side chain (glutamine, asparagine); a hydrophobic, aliphatic side chain (leucine, isoleucine, valine, alanine, glycine); an aromatic side chain (phenylalanine, tryptophan, tyrosine); a small side chain (glycine, alanine, serine, threonine, methionine); or an aliphatic hydroxyl side chain (serine, threonine).

Microarrays

[0118] Another aspect of the invention is a composition comprising a plurality of polynucleotide probes for use in detecting gene expression pattern(s) characteristic of particular cell type(s) and for detecting changes in the expression pattern of a particular cell type, e.g., lymphatic endothelial cells. For example, the invention comprehends an array, such as a microarray, comprising polynucleotides having at least 10 contiguous nucleotides selected from the polynucleotide sequences presented in the sequence listing.

[0119] Also contemplated are microarrays comprising polynucleotides having at least 10 contiguous nucleotides selected from the group of SEQ ID NOS: 1-30, 45, 47, 49 and 51. Microarrays of the invention comprise at least 3 polynucleotides, wherein each enumerated polynucleotide has a distinct sequence selected from the group consisting of SEQ ID NOS:1-30, 45, 47, 49 and 51. Such microarrays may also have duplicate polynucleotides and additional polynucleotides, e.g., control polynucleotides for use in hybridization-based assays using the microarray. Arrays, including microarrays, having more than three distinct polynucleotides according to the invention, such as at least five, seven, nine, 20, 50 or more such polynucleotides, will be recognized as arrays according to the invention having the capability of yielding subtle distinctions between biological samples such as various endothelial cell types, or of providing a different, and typically greater, level of confidence in the various uses of such arrays, e.g., in screening for particular endothelial cells, in screening for abnormal or diseases cells and tissues, and the like.

[0120] The term “microarray” refers to an ordered arrangement of hybridizable array elements. The array elements are arranged so that there are preferably at least three or more different array elements, more preferably at least 100 array elements, and most preferably at least 1,000 array elements, on a solid support. Preferably, the solid support is a 1 cm² substrate surface, bead, paper, nylon or other type of membrane, filter, chip, glass slide, or any other suitable solid support. The hybridization signal from each of the array elements is individually distinguishable. In a preferred embodiment, the array elements comprise polynucleotide probes.

[0121] Hybridization means contacting two or more nucleic acids under conditions suitable for base pairing. Hybridization includes interaction between partially or perfectly complementary nucleic acids. Suitable hybridization conditions are well known to those of skill in the art. In certain applications, it is appreciated that lower stringency conditions may be required. Under these conditions, hybridization may occur even though the sequences of the interacting strands are not perfectly complementary, being mismatched at one or more positions. Conditions may be rendered less stringent by adjusting conditions in accordance with the knowledge in the art, e.g., increasing salt concentration and/or decreasing temperature. Suitable hybridization conditions are those conditions that allow the detection of gene expression from identifiable expression units such as genes. Preferred hybridization conditions are stringent hybridization conditions, such as hybridization at 42° C. in a solution (ie., a hybridization solution) comprising 50% formamide, 1% SDS, 1 M NaCl, 10% dextran sulfate, and washing for 30 minutes at 65° C. in a wash solution comprising 1×SSC and 0.1% SDS. It is understood in the art that conditions of equivalent stringency can be achieved through variation of temperature and buffer, or salt concentration, as described in Ausubel, et al. (Eds.), Protocols in Molecular Biology, John Wiley & Sons (1994), pp. 6.0.3 to 6.4.10. Modifications in hybridization conditions can be empirically determined or precisely calculated based on the length and the percentage of guanosine/cytosine (GC) base pairing of the probe. The hybridization conditions can be calculated as described in Sambrook, et al., (Eds.), Molecular Cloning: A Laboratory Manual, Cold Spring Harbor Laboratory Press: Cold Spring Harbor, N.Y. (2d. Ed.; 1989), pp. 9.47 to 9.51.

[0122] One method of using probes and primers of the invention is in the detection of gene expression in human cells. Normally, the target will be expressed RNAs, although genomic DNA or a cDNA library may be screened. By varying the stringency of hybridization and the target binding site (i.e., the sequence of the probe, corresponding to a subset of one of the sequences set forth at SEQ ID NOS: 1-30, 45, 47, 49 and 51), different degrees of homology are expected to result in hybridization.

[0123] The microarray can be used for large-scale genetic or gene expression analysis of a large number of target polynucleotides. The microarray can also be used in the diagnosis of diseases and in the monitoring of treatments. Further, the microarray can be employed to investigate an individual's predisposition to a disease. Furthermore, the microarray can be employed to investigate cellular responses to infection, drug treatment, and the like.

[0124] The nucleic acid probes can be genomic DNA or cDNA or mRNA polynucleotides or oligonucleotides, or any RNA-like or DNA-like material, such as peptide nucleic acids, branched DNAs, and the like. The probes can be sense or antisense nucleotide probes. Where target polynucleotides are double-stranded, the probes may be either sense or antisense strands. Where the target polynucleotides are single-stranded, the probes are complementary single strands. In one embodiment, the probes are cDNAs. The size of the DNA sequence of interest may vary and is preferably from 100 to 10,000 nucleotides, more preferably from 150 to 3,500 nucleotides.

[0125] The probes can be prepared using a variety of synthetic or enzymatic techniques, which are well known in the art. The probes can be synthesized, in whole or in part, using chemical methods well known in the art (Caruthers et al., Nucleic Acids Res., Symp. Ser., 215-233, 1980).

Pharmaceutical Formulations and Routes of Administration

[0126] A protein of the present invention (from whatever source derived, such as from recombinant and non-recombinant sources) may be administered to a patient in need, by itself, or in pharmaceutical compositions where it is mixed with suitable carriers, diluents, adjuvants or excipients at doses to treat or ameliorate a variety of disorders. Such a composition may also contain (in addition to protein and a carrier) diluents, fillers, salts, buffers, stabilizers, solubilizers, and other materials well known in the art. The term “pharmaceutically acceptable” means a non-toxic material that does not interfere with the effectiveness of the biological activity of the active ingredient(s). The characteristics of the carrier will depend on the route of administration. The pharmaceutical composition of the invention may also contain cytokines, chemokines, lymphokines, growth factors, or other hematopoietic factors such as a PDGF, a VEGF (particularly a VEGF-C or a VEGF-D), VEGFR-3 (including soluble VEGFR-3 peptides comprising an extracellular domain), M-CSF, GM-CSF, TNF, IL-1, IL-2, IL-3, IL-4, IL-5, IL-6, IL-7, IL-8, IL-9, IL-10, IL-11, IL-12, IL-13, IL-14, IL-15, IFN, TNF0, TNF1, TNF2, G-CSF, Meg-CSF, thrombopoietin, stem cell factor, and erythropoietin. Various forms of these polypeptides are contemplated as well, such as isolated holoproteins, subunits, fragments (e.g., soluble fragments), and peptide fusions. The pharmaceutical composition may further contain other agents which either enhance the activity of the protein or complement its activity or use in treatment. Such additional factors and/or agents may be included in the pharmaceutical composition to produce a synergistic effect with a protein of the invention, or to minimize side effects. Conversely, a protein of the present invention may be included in formulations of the particular cytokine, lymphokine, other hematopoietic factor, thrombolytic or anti-thrombotic factor, or anti-inflammatory agent to minimize side effects of the cytokine, lymphokine, other hematopoietic factor, thrombolytic or anti-thrombotic factor, or anti-inflammatory agent. A protein of the present invention may be active in multimers (e.g., heterodimers or homodimers) or complexes with itself or other proteins. As a result, pharmaceutical compositions of the invention may comprise a protein of the invention in such muiltimeric or complexed form.

[0127] Techniques for formulation and administration of the compounds of the instant application may be found in “Remington's Pharmaceutical Sciences,” Mack Publishing Co., Easton, Pa., latest edition. A therapeutically effective dose further refers to that amount of the compound sufficient to result in amelioration of symptoms, e.g., treatment, healing, prevention or amelioration of the relevant medical condition, or an increase in rate of beneficial change, healing, prevention or amelioration of such conditions. When applied to an individual active ingredient, administered alone, a therapeutically effective dose refers to that ingredient alone. When applied to a combination, a therapeutically effective dose refers to combined amounts of the active ingredients that result in the therapeutic effect, whether administered in combination, serially or simultaneously.

[0128] In practicing methods of treatment or use of the present invention, a therapeutically effective amount of protein of the present invention is administered to a mammal having a condition or disorder to be treated. Protein of the present invention may be administered in accordance with the method of the invention either alone or in combination with other therapies such as treatments employing cytokines, lymphokines or other hematopoietic factors. When co-administered with one or more cytokines, lymphokines or other hematopoietic factors, a protein of the invention may be administered either simultaneously with the cytokine(s), lymphokine(s), other hematopoietic factor(s), thrombolytic or anti-thrombotic factors, or sequentially. If administered sequentially, the attending physician will decide on the appropriate sequence of administering a protein of the invention in combination with a cytokine(s), lymphokine(s), other hematopoietic factor(s), thrombolytic or anti-thrombotic factors.

Routes of Administration

[0129] Suitable routes of administration may, for example, include oral, rectal, transmucosal, or intestinal administration; parenteral delivery, including intramuscular, subcutaneous, intramedullary injections, as well as intrathecal, direct intraventricular, intravenous, intraperitoneal, intranasal, or intraocular injections. Administration of protein of the present invention used in the pharmaceutical composition or to practice the method of the present invention is carried out in a variety of conventional ways, such as oral ingestion, inhalation, topical application or cutaneous, subcutaneous, intraperitoneal, parenteral or intravenous injection. Intravenous administration to a mammal, such as a human patient, is preferred. Alternately, one may administer the compound in a local rather than systemic manner, for example, via injection of the compound at the site of intended action.

Compositions/Formulations

[0130] Pharmaceutical compositions for use in accordance with the present invention thus may be formulated in a conventional manner using one or more physiologically acceptable carriers comprising excipients and auxiliaries which facilitate processing of the active compounds into preparations which can be used pharmaceutically. These pharmaceutical compositions may be manufactured in a manner that is itself known, e.g., by means of conventional mixing, dissolving, granulating, dragee-making, levigating, emulsifying, encapsulating, entrapping or lyophilizing processes. Proper formulation is dependent upon the route of administration chosen. When a therapeutically effective amount of protein of the present invention is administered orally, protein of the present invention will be in the form of a tablet, capsule, powder, solution or elixir. When administered in tablet form, the pharmaceutical composition of the invention may additionally contain a solid carrier such as a gelatin or an adjuvant. The tablet, capsule, and powder contain from about 5 to 95% protein of the present invention, and preferably firom about 25 to 90% protein of the present invention. When administered in liquid form, a liquid carrier such as water, petroleum, oils of animal or plant origin such as peanut oil, mineral oil, soybean oil, or sesame oil, or synthetic oils may be added. The liquid form of the pharmaceutical composition may further contain physiological saline solution, dextrose or other saccharide solution, or glycols such as ethylene glycol, propylene glycol or polyethylene glycol. When administered in liquid form, the pharmaceutical composition contains from about 0.5 to 90% by weight of protein of the present invention, and preferably from about 1 to 50% protein of the present invention.

[0131] When a therapeutically effective amount of protein of the present invention is administered by intravenous, cutaneous or subcutaneous injection, protein of the present invention will be in the form of a pyrogen-free, parenterally acceptable aqueous solution. The preparation of such parenterally acceptable protein solutions, having due regard to pH, isotonicity, stability, and the like, is within the skill in the art. A preferred pharmaceutical composition for intravenous, cutaneous, or subcutaneous injection should contain, in addition to protein of the present invention, an isotonic vehicle such as Sodium Chloride Injection, Ringer's Injection, Dextrose Injection, Dextrose and Sodium Chloride Injection, Lactated Ringer's Injection, or other vehicle as known in the art. The pharmaceutical composition of the present invention may also contain stabilizers, preservatives, buffers, antioxidants, or other additives known to those of skill in the art. For injection, the agents of the invention may be formulated in aqueous solutions, preferably in physiologically compatible buffers such as Hanks' solution, Ringer's solution, or physiological saline buffer. For transmucosal administration, penetrants appropriate to the barrier to be permeated are used in the formulation. Such penetrants are generally known in the art.

[0132] For oral administration, the compounds can be formulated readily by combining the active compounds with pharmaceutically acceptable carriers well known in the art. Such carriers enable the compounds of the invention to be formulated as tablets, pills, dragees, capsules, liquids, gels, syrups, slurries, suspensions and the like, for oral ingestion by a patient to be treated. Pharmaceutical preparations for oral use can be obtained by combination with a solid excipient, optionally grinding a resulting mixture, and processing the mixture of granules, after adding suitable auxiliaries, if desired, to obtain tablets or dragee cores. Suitable excipients are, in particular, fillers such as sugars, including lactose, sucrose, mannitol, or sorbitol; cellulose preparations such as, for example, maize starch, wheat starch, rice starch, potato starch, gelatin, gum tragacanth, methyl cellulose, hydroxypropylmethyl-cellulose, sodium carboxymethylcellulose, and/or polyvinylpyrrolidone (PVP). If desired, disintegrating agents may be added, such as the cross-linked polyvinyl pyrrolidone, agar, or alginic acid or a salt thereof such as sodium alginate. Dragee cores are provided with suitable coatings. For this purpose, concentrated sugar solutions may be used, which may optionally contain gum arabic, talc, polyvinyl pyrrolidone, carbopol gel, polyethylene glycol, and/or titanium dioxide, lacquer solutions, and suitable organic solvents or solvent mixtures. Dyestuffs or pigments may be added to the tablets or dragee coatings for identification or to characterize different combinations of active compound doses.

[0133] Pharmaceutical preparations which can be used orally include push-fit capsules made of gelatin, as well as soft, sealed capsules made of gelatin and a plasticizer, such as glycerol or sorbitol. The push-fit capsules can contain the active ingredients in admixture with filler such as lactose, binders such as starches, and/or lubricants such as talc or magnesium stearate and, optionally, stabilizers. In soft capsules, the active compounds may be dissolved or suspended in suitable liquids, such as fatty oils, liquid paraffin, or liquid polyethylene glycols. In addition, stabilizers may be added. All formulations for oral administration should be in dosages suitable for such administration. For buccal administration, the compositions may take the form of tablets or lozenges formulated in conventional manner.

[0134] For administration by inhalation, the compounds for use according to the present invention are conveniently delivered in the form of an aerosol spray presentation from pressurized packs or a nebuliser, with the use of a suitable propellant, e.g., dichlorodifluoromethane, trichlorofluoromethane, dichlorotetrafluoroethane, carbon dioxide or other suitable gas. In the case of a pressurized aerosol the dosage unit may be determined by providing a valve to deliver a metered amount. Capsules and cartridges of, e.g., gelatin for use in an inhaler or insufflator may be formulated containing a powder mix of the compound and a suitable powder base such as lactose or starch. The compounds may be formulated for parenteral administration by injection, e.g., by bolus injection or continuous infusion. Formulations for injection may be presented in unit dosage form, e.g., in ampoules or in multi-dose containers, with an added preservative. The compositions may take such forms as suspensions, solutions or emulsions in oily or aqueous vehicles, and may contain formulatory-agents such as suspending, stabilizing and/or dispersing agents.

[0135] Pharmaceutical formulations for parenteral administration include aqueous solutions of the active compounds in water-soluble form. Additionally, suspensions of the active compounds may be prepared as appropriate oily injection suspensions. Suitable lipophilic solvents or vehicles include fatty oils such as sesame oil, or synthetic fatty acid esters, such as ethyl oleate or triglycerides, or liposomes. Aqueous injection suspensions may contain substances which increase the viscosity of the suspension, such as sodium carboxymethyl cellulose, sorbitol, or dextran. Optionally, the suspension may also contain suitable stabilizers or agents which increase the solubility of the compounds to allow for the preparation of highly concentrated solutions. Alternatively, the active ingredient may be in powder form for constitution with a suitable vehicle, e.g., sterile pyrogen-free water, before use.

[0136] The compounds may also be formulated in rectal compositions such as suppositories or retention enemas, e.g., containing conventional suppository bases such as cocoa butter or other glycerides. In addition to the formulations described previously, the compounds may also be formulated as a depot preparation. Such long-acting formulations may be administered by implantation (for example subcutaneously or intramuscularly) or by intramuscular injection. Thus, for example, the compounds may be formulated with suitable polymeric or hydrophobic materials (for example as an emulsion in an acceptable oil) or ion exchange resins, or as sparingly soluble derivatives, for example, as a sparingly soluble salt.

[0137] A pharmaceutical carrier for the hydrophobic compounds of the invention is a cosolvent system comprising benzyl alcohol, a nonpolar surfactant, a water-miscible organic polymer, and an aqueous phase. The cosolvent system may be the VPD co-solvent system. VPD is a solution of 3% w/v benzyl alcohol, 8% w/v of the nonpolar surfactant polysorbate 80, and 65% w/v polyethylene glycol 300, made up to volume in absolute ethanol. The VPD co-solvent system (VPD:5W) consists of VPD diluted 1:1 with a 5% dextrose-in-water solution. This co-solvent system dissolves hydrophobic compounds well, and itself produces low toxicity upon systemic administration. Naturally, the proportions of a co-solvent system may be varied considerably without destroying its solubility and toxicity characteristics. Furthermore, the identity of the co-solvent components may be varied: for example, other low-toxicity nonpolar surfactants may be used instead of polysorbate 80; the fraction size of polyethylene glycol may be varied; other biocompatible polymers may replace polyethylene glycol, e.g., polyvinyl pyrrolidone; and other sugars or polysaccharides may substitute for dextrose. Alternatively, other delivery systems for hydrophobic pharmaceutical compounds may be employed. Liposomes and emulsions are well known examples of delivery vehicles or carriers for hydrophobic drugs. Certain organic solvents such as dimethylsulfoxide also may be employed, although usually at the cost of greater toxicity. Additionally, the compounds may be delivered using a sustained-release system, such as semipermeable matrices of solid hydrophobic polymers containing the therapeutic agent. Various sustained-release materials have been established and are well known by those skilled in the art. Sustained-release capsules may, depending on their chemical nature, release the compound over a time period of a few weeks up to over 100 days. Depending on the chemical nature and the biological stability of the therapeutic reagent, additional strategies for protein stabilization may be employed.

[0138] The pharmaceutical compositions also may comprise suitable solid or gel-phase carriers or excipients. Examples of such carriers or excipients include but are not limited to calcium carbonate, calcium phosphate, various sugars, starches, cellulose derivatives, gelatin, and polymers such as polyethylene glycols. Many of the proteinase-inhibiting compounds of the invention may be provided as salts with pharmaceutically compatible counterions. Such pharmaceutically acceptable base addition salts are those salts which retain the biological effectiveness and properties of the free acids and which are obtained by reaction with inorganic or organic bases such as sodium hydroxide, magnesium hydroxide, ammonia, trialkylamine, dialkylamine, monoalkylamine, dibasic amino acids, sodium acetate, potassium benzoate, triethanol amine, and the like.

[0139] The pharmaceutical compositions of the invention may be in the form of a complex of a protein(s) of the present invention along with protein or peptide antigens. The pharmaceutical compositions of the invention may be in the form of a liposome in which protein of the present invention is combined, in addition to other pharmaceutically acceptable carriers, with amphipathic agents such as lipids which exist in aggregated form as micelles, insoluble monolayers, liquid crystals, or lamellar layers in aqueous solution. Suitable lipids for liposomal formulation include, without limitation, monoglycerides, diglycerides, sulfatides, lysolecithin, phospholipids, saponin, bile acids, and the like. Preparation of such liposomal formulations is within the level of skill in the art, as disclosed, for example, in U.S. Pat. Nos. 4,235,871; 4,501,728; 4,837,028; and 4,737,323, each of which is incorporated herein by reference.

[0140] The amount of protein of the invention in the pharmaceutical composition will depend upon the nature and severity of the condition being treated, and on the nature of prior treatments which the patient has undergone. Ultimately, the attending physician will decide the amount of protein of the present invention with which to treat each individual patient. Initially, the attending physician will administer low doses of protein of the present invention and observe the patient's response. Larger doses of protein of the present invention may be administered until the optimal therapeutic effect is obtained for the patient, and at that point the dosage is not increased further. It is contemplated that the various pharmaceutical compositions used to practice the methods of the invention should contain about 0.01 μg to about 100 mg (preferably about 0.1 μg to about 10 mg, more preferably about 0.1 μg to about 1 mg) of protein of the invention per kg body weight. When administered, the therapeutic composition for use in this invention is in a pyrogen-free, physiologically acceptable form. Therapeutically useful agents other than a protein of the invention which may also optionally be included in the composition as described above, may alternatively or additionally, be administered simultaneously or sequentially with the composition in the methods of the invention.

[0141] Polynucleotides of the present invention can also be used for gene therapy. Such polynucleotides can be introduced either in vivo or ex vivo into cells for expression in a mammalian subject. Polynucleotides of the invention may also be administered by other known methods for introduction of nucleic acid into a cell or organism (including, without limitation, in the form of viral vectors or naked DNA). Cells may also be cultured ex vivo in the presence of proteins of the present invention in order to proliferate or to produce a desired effect on or activity in such cells. Treated cells can then be introduced in vivo for therapeutic purposes.

Effective Dosage

[0142] Pharmaceutical compositions suitable for use in the present invention include compositions wherein the active ingredients are contained in an effective amount to achieve an intended purpose. More specifically, a therapeutically effective amount means an amount effective to prevent development of, or to alleviate the existing symptoms of, the subject being treated. Suitable properties that may be used in determining effective dosages include measurements of LEC and/or BEC growth stimulation or inhibition, rates or extent of cell differentiation into LECs and/or BECs, tendencies of cell expression patterns to shift towards or away from LEC- or BEC-specific expression patterns, and the like. Determination of the effective amounts is well within the capability of those skilled in the art, especially in light of the detailed disclosure provided herein. For any compound used in a method of the invention, the therapeutically effective dose can be estimated initially from cell culture assays. For example, for inhibitory methods, a dose can be formulated in animal models to achieve a circulating concentration range that includes the IC₅₀ as determined in cell culture (i.e., the concentration of the test compound which achieves a half-maximal inhibitory concentration). Such information can be used to more accurately determine useful doses in humans.

[0143] A therapeutically effective dose refers to that amount of the compound that results in amelioration of symptoms or, in the case of life-threatening conditions, a prolongation of survival in a patient. Toxicity and therapeutic efficacy of such compounds can be determined by standard pharmaceutical procedures in cell cultures or experimental animals, e.g., for determining the LD₅₀ (the dose lethal to 50% of the population) and the ED₅₀ (the dose therapeutically effective in 50% of the population). The dose ratio between toxic and therapeutic effects is the therapeutic index and it can be expressed as the ratio between LD₅₀ and ED₅₀. Compounds which exhibit high therapeutic indices are preferred. The data obtained from these cell culture assays and animal studies can be used in formulating a range of dosage for use in human. The dosage of such compounds lies preferably within a range of circulating concentrations that include the ED₅₀ with little or no toxicity. The dosage may vary within this range depending upon the dosage form employed and the route of administration utilized. The exact formulation, route of administration and dosage can be chosen by the individual physician in view of the patient's condition. See, e.g., Fingl et al., 1975, in “The Pharmacological Basis of Therapeutics”, Ch. 1 p. 1.

[0144] The amount of composition administered will, of course, be dependent on the subject being treated, on the subject's weight, the severity of the affliction, the manner of administration and the judgment of the prescribing physician.

Packaging

[0145] The compositions may, if desired, be presented in a pack or dispenser device which may contain one or more unit dosage forms containing the active ingredient. The pack may, for example, comprise metal or plastic foil, such as a blister pack. The pack or dispenser device may be accompanied by instructions for administration. Compositions comprising a compound of the invention formulated in a compatible pharmaceutical carrier may also be prepared, placed in an appropriate container, and labelled for treatment of an indicated condition.

[0146] In addition, the invention comprehends a use of such a composition to manufacture a medicament for the treatment of a cell or an organism, such as a human patient, having a hyperproliferative or hypoproliferative disorder of a LEC and/or BEC, such as lymphedema, lymphangioma, lymphangiomyeloma, lymphangiomatosis, lymphangiectasis, Iymphosarcoma, or lymphangiosclerosis, comprising administering an effective amount, or dose, of a composition according to the invention to the cell or organism. Suitable compositions include, but are not limited to, any polynucleotide according to the invention (e.g., an antisense polynucleotide), any polypeptide according to the invention, an antibody specifically recognizing a polynucleotide or polypeptide according to the invention, a small molecule compound effective in modulating the expression of a polynucleotide according to the invention, and the like. Also contemplated are uses of compositions according to the invention for the manufacture of a medicament to ameliorate a symptom associated with a LEC- or BEC-associated disease or disorder.

Antibodies

[0147] Antibodies are useful for modulating the polypeptides of the invention due to the ability to easily generate antibodies with relative specificity, and due to the continued improvements in technologies for adopting antibodies to human therapy. Thus, the invention contemplates use of antibodies (e.g., monoclonal and polyclonal antibodies, single chain antibodies, chimeric antibodies, bifunctional/bispecific antibodies, humanized antibodies, human antibodies, and complementary determining region (CDR)-grafted antibodies, including compounds which include CDR sequences which specifically recognize a polypeptide of the invention), specific for polypeptides of interest to the invention. Preferred antibodies are human antibodies, such as those produced in transgenic animals, which are produced and identified according to methods described in WO93/11236, published Jun. 20, 1993, which is incorporated herein by reference in its entirety. Antibody fragments, including Fab, Fab′, F(ab′)2, and Fv, are also provided by the invention. The term “specific for,” when used to describe antibodies of the invention, indicates that the variable regions of the antibodies of the invention recognize and bind the polypeptide of interest at a detectably different, and greater, level that bind to other substances (i.e., able to distinguish the polypeptides of interest from other known polypeptides of the same family, by virtue of measurable differences in binding affinity, despite the possible existence of localized sequence identity, homology, or similarity between family members). It will be understood that specific antibodies may also interact with other proteins (for example, S. aureus protein A or other antibodies in ELISA techniques) through interactions with sequences outside the variable region of the antibodies, and in particular, in the constant region of the molecule. Screening assays to determine binding specificity of an antibody of the invention are well known and routinely practiced in the art. For a comprehensive discussion of such assays, see Harlow et al. (Eds.), Antibodies A Laboratory Manual; Cold Spring Harbor Laboratory; Cold Spring Harbor, N.Y. (1988), Chapter 6.

[0148] Non-human antibodies may be humanized by any method known in the art. A preferred “humanized antibody” has a human constant region, while the variable region, or at least a complementarity-determining region (CDR), of the antibody is derived from a non-human species. Methods for humanizing non-human antibodies are well known in the art. (see U.S. Pat. Nos. 5,585,089, and 5,693,762). Generally, a humanized antibody has one or more amino acid residues introduced into its framework region from a source which is non-human. Humanization can be performed, for example, using methods described in Jones et al. [Nature 321: 522-525, (1986)], Riechmann et al., [Nature, 332: 323-327, (1988)] and Verhoeyen et al. [Science 239:1534-1536, (1988)], by substituting at least a portion of a rodent CDR for the corresponding regions of a human antibody. Numerous techniques for preparing engineered antibodies are described, e.g., in Owens and Young, J. Immunol. Meth., 168:149-165 (1994). Further changes can then be introduced into the antibody framework to modulate affinity or immunogenicity.

[0149] The invention further provides a hybridoma that produces an antibody according to the invention. Antibodies of the invention are useful for detection and/or purification of the polypeptides of the invention.

[0150] Polypeptides and/or polynucleotides of the invention may also be used to immunize animals to obtain polyclonal and monoclonal antibodies which specifically react with the polypeptide. Such antibodies may be obtained using either the entire polypeptide or fragments thereof as an immunogen. The peptide immunogens additionally may contain a cysteine residue at the carboxyl terminus, and may be conjugated to a hapten such as keyhole limpet hemocyanin (KLH). Methods for synthesizing such peptides are known in the art, for example, as in R. P. Merrifield, J. Amer. Chem. Soc. 85:2149-2154 (1963); J. L. Krstenansky, et al., FEBS Lett. 211: 10 (1987). Monoclonal antibodies binding to the protein of the invention may be useful diagnostic agents for the immunodetection of the polypeptide. Neutralizing monoclonal antibodies binding to the polypeptide may also be useful therapeutics for both conditions associated with the polypeptide and also in the treatment of some forms of cancer where abnormal expression of the polypeptide is involved. In the case of cancerous cells or leukemic cells, neutralizing monoclonal antibodies against the polypeptide are useful in detecting and preventing the metastatic spread of the cancerous cells mediated by the polypeptide. In general, techniques for preparing polyclonal and monoclonal antibodies as well as hybridomas capable of producing the desired antibody are well known in the art (Campbell, A. M., Monoclonal Antibodies Technology: Laboratory Techniques in Biochemistry and Molecular Biology, Elsevier Science Publishers, Amsterdam, The Netherlands (1984); St. Groth et al., J. Immunol. 35:1-21 (1990); Kohler and Milstein, Nature 256:495-497 (1975)), the trioma technique, the human B-cell hybridoma technique (Kozbor et al., Immunology Today 4:72 (1983); Cole et al., in Monoclonal Antibodies and Cancer Therapy, Alan R. Liss, Inc. (1985), pp. 77-96).

[0151] Any animal (mouse, rabbit, and the like) which is known to produce antibodies can be immunized with a peptide or polypeptide of the invention. Methods for immunization are well known in the art. Such methods include subcutaneous or intraperitoneal injection of the polypeptide. One skilled in the art will recognize that the amount of the polypeptide encoded by an ORF of the invention used for immunization will vary based on the animal which is immunized, the antigenicity of the peptide and the site of injection. The protein that is used as an immunogen may be modified or administered in an adjuvant in order to increase the protein's antigenicity. Methods of increasing the antigenicity of a protein are well known in the art and include, but are not limited to, coupling the antigen with a heterologous protein (such as a globulin or β-galactosidase) or through the inclusion of an adjuvant during immunization.

[0152] For monoclonal antibodies, spleen cells from the immunized animals are removed, fused with myeloma cells, such as SP2/0-Ag14 myeloma cells, and allowed to become monoclonal-antibody-producing hybridoma cells. Any one of a number of methods well known in the art can be used to identify the hybridoma cell which produces an antibody with the desired characteristics. These include screening the hybridomas with an ELISA assay, Western blot analysis, or radioimmunoassay (Lutz et al., Exp. Cell Research. 175:109-124. 1988). Hybridomas secreting the desired antibodies are cloned and the class and subclass is determined using procedures known in the art (Campbell, A. M., Monoclonal Antibody Technology: Laboratory Techniques in Biochemistry and Molecular Biology, Elsevier Science Publishers, Amsterdam, The Netherlands (1984)). Techniques described for the production of single-chain antibodies (U.S. Pat. No. 4,946,778) can be adapted to produce single-chain antibodies to polypeptide of the invention.

[0153] For polyclonal antibodies, antibody-containing antiserum is isolated from the immunized animal and is screened for the presence of antibodies with the desired specificity using one of the above-described procedures. The invention further provides the above-described antibodies in detectably labeled form. Antibodies can be detectably labeled through the use of radioisotopes, affinity labels (such as biotin, avidin, and the like), enzymatic labels (such as horseradish peroxidase, alkaline phosphatase, and the like) fluorescent labels (such as FITC or rhodamine, and the like), paramagnetic atoms, and the like. Procedures for accomplishing such labeling are well-known in the art; for example, see Stemberger, L. A. et al., J. Histochem. Cytochem. 18:315. 1970; Bayer, E. A. et al., Meth. Enzym. 62:308 (1979); Engval, E. et al., Immunol. 109:129. 1972; and Goding, J. W. J. Immunol. Meth. 13:215. (1976).

[0154] The labeled antibodies of the present invention can be used for in vitro, in vivo, and in situ assays to identify cells or tissues in which a fragment of the polypeptide of interest is expressed. The antibodies may also be used directly in therapies or other diagnostics. The present invention further provides the above-described antibodies immobilized on a solid support. Examples of such solid supports include plastics such as polycarbonate, complex carbohydrates such as agarose and sepharose, and acrylic resins such as polyacrylamide and latex beads. Techniques for coupling antibodies to such solid supports are well known in the art (Weir, D. M. et al., “Handbook of Experimental Immunology” 4th Ed., Blackwell Scientific Publications, Oxford, England, Chapter 10 (1986); Jacoby, W. D. et al., Meth. Enzym. 34 Academic Press, N.Y. (1974)). The immobilized antibodies of the present invention can be used for in vitro, in vivo, and in situ assays as well as for immuno-affinity purification of the proteins of the present invention.

Computer-Readable Sequences

[0155] In one application of this embodiment, a nucleotide sequence of the present invention can be recorded on computer-readable media. As used herein, “computer-readable media” refers to any medium which can be read and accessed directly by a computer. Such media include, but are not limited to, magnetic storage media, such as floppy discs, hard disc storage medium, and magnetic tape; optical storage media such as CD-ROM; electrical storage media such as RAM and ROM; and hybrids of these categories such as magnetic/optical storage media. A skilled artisan can readily appreciate how any of the presently known computer-readable media can be used to create a manufacture comprising computer-readable medium having recorded thereon a nucleotide sequence of the present invention. As used herein, “recorded” refers to a process for storing information on computer-readable medium. A skilled artisan can readily adopt any of the presently known methods for recording information on a computer-readable medium to generate manufactures comprising the nucleotide sequence information of the present invention.

[0156] A variety of data storage structures are available to a skilled artisan for creating a computer-readable medium having recorded thereon a nucleotide sequence of the present invention. The choice of the data storage structure will generally be based on the means chosen to access the stored information. In addition, a variety of data processor programs and formats can be used to store the nucleotide sequence information of the present invention on computer readable medium. The sequence information can be represented in a word processing text file, formatted in commercially-available software such as WordPerfect and Microsoft Word, or represented in the form of an ASCII file, stored in a database application, such as DB2, Sybase, Oracle, or the like. A skilled artisan can readily adapt any number of data processor structuring formats (e.g., text file or database) in order to obtain computer readable medium having recorded thereon the nucleotide sequence information of the present invention. By providing the nucleotide sequence of SEQ ID NO: 1-30, 45, 47, 49 and 51 or a representative fragment thereof, or a nucleotide sequence at least 99.9% identical to SEQ ID NO: 1-30, 45, 47, 49 and 51 in computer-readable form, a skilled artisan can routinely access the sequence information for a variety of purposes. Computer software is publicly available which allows a skilled artisan to access sequence information provided in a computer-readable medium. The examples which follow demonstrate how software which implements the BLAST (Altschul et al., J. Mol. Biol. 215:403-410. 1990) and BLAZE (Brutlag et al., Comp. Chem. 17:203-207 (1993)) search algorithms on a Sybase system is used to identify open reading frames (ORFs) within a nucleic acid sequence. Such ORFs may be protein-encoding fragments and may be useful in producing commercially important proteins such as enzymes used in fermentation reactions and in the production of commercially useful metabolites.

[0157] As used herein, “a computer-based system” refers to the hardware means, software means, and data storage means used to analyze the nucleotide sequence information of the present invention. The minimum hardware means of the computer-based systems of the present invention comprises a central processing unit (CPU), input means, output means, and data storage means. A skilled artisan can readily appreciate that any one of the currently available computer-based systems are suitable for use in the invention. As stated above, the computer-based systems of the present invention comprise a data storage means having stored therein a nucleotide sequence of the present invention and the necessary hardware means and software means for supporting and implementing a search means. As used herein, “data storage means” refers to memory which can store nucleotide sequence information of the present invention, or a memory access means which can access manufactures having recorded thereon the nucleotide sequence information of the present invention.

[0158] As used herein, “search means” refers to one or more programs which are implemented on the computer-based system to compare a target sequence or target structural motif with the sequence information stored within the data storage means. Search means are used to identify fragments or regions of a known sequence which match a particular target sequence or target motif. A variety of known algorithms are disclosed publicly and a variety of commercially available software for conducting search means are and can be used in the computer-based systems of the present invention. Examples of such software includes, but is not limited to, MacPattern (EMBL), BLASTN and BLASTA (NPOLYPEPTIDEIA). A skilled artisan can readily recognize that any one of the available algorithms or implementing software packages for conducting homology searches can be adapted for use in the present computer-based systems. As used herein, a “target sequence” can be any nucleic acid or amino acid sequence of six or more nucleotides or two or more amino acids. A skilled artisan can readily recognize that the longer a target sequence is, the less likely a target sequence will be present as a random occurrence in the database. The most preferred sequence length of a target sequence is from about 10 to 100 amino acids or from about 30 to 300 nucleotide residues. However, it is well recognized that searches for commercially important fragments, such as sequence fragments involved in gene expression and protein processing, may be of shorter length.

[0159] As used herein, “a target structural motif,” or “target motif,” refers to any rationally selected sequence or combination of sequences in which the sequence(s) are chosen based on a three-dimensional configuration which is formed upon the folding of the target motif. There are a variety of target motifs known in the art. Protein target motifs include, but are not limited to, enzyme active sites and signal sequences. Nucleic acid target motifs include, but are not limited to, promoter sequences, hairpin structures and inducible expression elements (protein binding sequences).

Diagnostic Assays and Kits

[0160] The present invention further provides diagnostic assays, and related kits, for hyper- and/or hypo-proliferative disorders or diseases of endothelial cells such as LECs or BECs. These assays comprise methods to identify the presence or expression of one of the ORFs of the present invention, or homolog thereof, in a test sample, using a nucleic acid probe or an antibody according to the invention.

[0161] In general, methods for detecting a polynucleotide of the invention can comprise contacting a sample with a compound that binds to and forms a complex with, the polynucleotide for a period sufficient to form the complex, and detecting the complex, so that if a complex is detected, a polynucleotide of the invention is detected in the sample.

[0162] Such methods can also comprise contacting a sample under stringent hybridization conditions with nucleic acid primers that anneal to a polynucleotide of the invention under such conditions, and amplifying annealed polynucleotides, so that if a polynucleotide is amplified, a polynucleotide of the invention is detected in the sample.

[0163] In general, methods for detecting a polypeptide of the invention can comprise contacting a sample with a compound that binds to and forms a complex with the polypeptide for a period sufficient to form the complex, and detecting the complex, so that if a complex is detected, a polypeptide of the invention is detected in the sample. In detail, such methods comprise incubating a test sample with one or more of the antibodies or one or more of the nucleic acid probes of the invention and assaying for binding of the nucleic acid probes or antibodies to components within the test sample.

[0164] Conditions for incubating a nucleic acid probe or antibody with a test sample vary. Incubation conditions depend on the format employed in the assay, the detection methods employed, and the type and nature of the nucleic acid probe or antibody used in the assay. One skilled in the art will recognize that any one of the commonly available hybridization, amplification or immunological assay formats can readily be adapted to employ the nucleic acid probes or antibodies of the present invention. Examples of such assays can be found in Chard, T., An Introduction to Radioimmunoassay and Related Techniques, Elsevier Science Publishers, Amsterdam, The Netherlands (1986); Bullock, G. R. et al., Techniques in Inmunocytochemistry, Academic Press, Orlando, Fla. Vol. 1 (1982), Vol. 2 (1983), Vol. 3 (1985); Tijssen, P., Practice and Theory of immunoassays: Laboratory Techniques in Biochemistry and Molecular Biology, Elsevier Science Publishers, Amsterdam, The Netherlands (1985). The test samples of the present invention include cells, protein or membrane extracts of cells, or biological fluids such as sputum, blood, serum, plasma, or urine. The test sample used in the above-described method will vary based on the assay format, nature of the detection method and the tissues, and cells or extracts used as the sample to be assayed. Methods for preparing protein extracts or membrane extracts of cells are well known in the art and can be readily be adapted in order to obtain a sample which is compatible with the system utilized.

[0165] In another embodiment of the present invention, kits are provided which contain the necessary reagents to carry out the assays of the present invention. In one embodiment, the invention provides a compartment kit to receive, in close confinement, one or more containers which comprises: (a) a first container comprising one of the probes or antibodies of the present invention; and (b) one or more other containers comprising one or more of the following: wash reagents, reagents capable of detecting presence of a bound probe or antibody.

[0166] In detail, a compartment kit includes any kit in which reagents are contained in separate containers. Such containers include small glass containers, plastic containers or strips of plastic or paper. Such containers allows one to efficiently transfer reagents from one compartment to another compartment such that the samples and reagents are not cross-contaminated, and the agents or solutions of each container can be added in a quantitative fashion from one compartment to another. Such containers will include a container which will accept the test sample, a container which contains the antibody or antibodies used in the assay, containers which contain wash reagents (such as phosphate-buffered saline, Tris buffers, and the like), and containers which contain the reagents used to detect the bound antibody or probe. Types of detection reagents include labeled nucleic acid probes, labeled secondary antibodies, or in the alternative, if the primary antibody is labeled, the enzymatic, or antibody binding reagents which are capable of reacting with the labeled antibody. One skilled in the art will readily recognize that the disclosed probes and antibodies of the present invention can be readily incorporated into one of the established kit formats which are well known in the art.

### EXAMPLES

[0167] Methods used in the examples are as follows:

Antibodies

[0168] Monoclonal antibodies against human VEGFR-3 (clone 2E11D11; see International Patent Application No. PCT/US02/22164, published as WO 03/006104), PAL-E (Monosan), CD31 (Dako), N-cadherin, VE-cadherin, β-catenin and plakoglobin and polyclonal rabbit anti-human podoplanin were used (Breiteneder-Geleff, S., et al., Am. J. Pathol. 154:385-394 (1999)); Mouse anti-human integrin α9 was provided by Dr. Dean Sheppard (University of California at San Francisco, San Francisco) and Dr. Curzio Rüegg (University of Lausanne Medical School, Lausanne, Switzerland). The fluorochrome-conjugated secondary antibodies were obtained from Jackson Immunoresearch.

Cell Culture and Transfection

[0169] Human amniotic epithelial cells were cultured in Med199 medium in the presence of 5% fetal calf serun. Human dermal microvascular endothelial cells were obtained from PromoCell (Heidelberg, Germany). Anti-Podoplanin antibodies, MACS colloidal super-paramagnetic MicroBeads conjugated to goat anti-rabbit IgG antibodies (Miltenyi Biotech, Bergisch Gladbach, Germany), LD and MS separation columns and Midi/MiniMACS separators (Miltenyi Biotech) were used for cell sorting according to the instructions of the manufacturer. The isolated cells were cultured on fibronectin-coated (10 μg/ml, Sigma, St. Louis, Mo.) plates as described (Mäkinen, T., et al., EMBO J. 20:4762-4773. 2001).

RNA Isolation, Northern Blotting and Microarray Analyses

[0170] Total RNA was isolated and DNAseI treated in RNeasy columns (Qiagen, Valencia, Calif.). ³²P-labeled probes for hybridization with the Atlas filters (Clontech) were prepared using 2-5 μg of total RNA according to the manufacturer's instructions with the exception that the probe was purified using Nick-25 columns (Pharmacia Biotech, Uppsala, Sweden). Following hybridizations and washes, the membranes were analyzed using a Fuji BAS 100 phosphoimager. For the Affymetrix® analysis, four independent BEC and LEC sample preparations and hybridizations were carried out using RNA extracted from four lots of cells isolated from different individuals. For the Affymetrix® expression analysis, 5 μg of total RNA was used for the synthesis of double-stranded cDNA using Custom SuperScript ds-cDNA Synthesis Kit (Invitrogen, Carlsbad, Calif.). Biotin-labeled cRNA was then prepared using the Enzo BioArrayTMHighYieldTMRNA Transcript Labelling Kit (Affymetrix, Santa Clara, Calif.), and the unincorporated nucleotides were removed using RNeasy columns (Qiagen, Valencia, Calif.). The hybridization, washing and staining of Human Genome 95Av2 microarrays (for Prox-1 experiments) and 9513-E microarrays, which mainly contain uncharacterized EST sequences, were done according to the instructions of the manufacturer (Affymetrix, GeneChip Expression Analysis Technical Manual). The probe arrays were scanned at 570 nm using an Agilent GeneArray® Scanner and the readings from the quantitative scanning were analyzed by the Affymetrix® Microarray Suite version 5.0 and Data Mining Tool version 3.0. For the comparison analyses, the hybridization intensities were calculated using a global scaling intensity of 100.

[0171] The differentially expressed sequences were used for searching EST contigs in the GenBank database of the National Center for Biotechnology Information and the National Library of Medicine. (NCBI/NLM), and open reading frames were predicted using the orf finder software available at NCBI/NLM. The SOSUI system was used for prediction of transmembrane helices and signal sequences from the protein sequences, and other protein domain architectures were analysed using Pfam (Protein families database of alignments and HMMs).

Immunofluorescence and Immunohistochemistry

[0172] The cells were cultured on coverslips, fixed with 4% paraformaldehyde, permeabilized with 0.1% Triton-X100 in phosphate-buffered saline (PBS) and stained with the primary antibodies. For integrin α9, staining live cells were incubated with the antibody for 15 minutes on ice before fixation. The cells were further stained with FITC- or TRITC-conjugated secondary antibodies. F-actin was stained using TexasRed-conjugated phalloidin (Molecular Probes, Eugene, Oreg.). Cells were counterstained with Hoechst 33258 fluorochrome (Sigma) and viewed using a Zeiss Axioplan 2 fluorescent microscope.

[0173] Normal human skin obtained after surgical removal was embedded in Tissue-Tek® (Sakura, The Netherlands), frozen and sectioned. The sections (6 μm) were fixed in cold acetone for 10 minutes and stained with the primary antibodies followed by peroxidase staining using Vectastain Elite ABC kit (Vector Laboratories, Burlingame, Calif.) and 3-amino-9-ethyl carbazole (Sigma, St. Louis, Mo.).

### Example 1

### Identification of Differentially Expressed Genes

[0174] Blood vascular and lymphatic endothelial cells (BEC and LEC, respectively) were isolated from cultures of human dermal microvascular endothelial cells using magnetic microbeads and antibodies against the lymphatic endothelial cell surface marker podoplanin (Breiteneder-Geleff, S., et al., Am. J. Pathol. 154:385-394 (1999); Makinen, T., et al., EMBO J. 20:4762-4773 (2001)). The purities of the isolated BEC and LEC populations were confirmed to be over 99% as assessed by immunofluorescence using antibodies against VEGFR-3 or podoplanin. The isolated cells were cultured for a couple of passages, and RNA was extracted from the cultures and used for hybridization with oligonucleotide microarrays containing sequences from about 12,000 known genes, ie., approximately ⅓ of the total number of all predicted human transcripts.

[0175] As expected, podoplanin, desmoplakin I/II and the macrophage mannose receptor, which are known lymphatic endothelial cell markers, were found specifically in the LECs. See, Breiteneder-Geleff, S., et al., Am. J. Pathol. 154:385-394 (1999); Ebata, N., et al., Microvasc. Res. 61:40-48. (2001); and Irjala, H., et al., J. Exp. Med. 194:1033-1041 (2001). Since these results were consistent with the known gene expression patterns in vivo and in vitro, further characterization of the gene expression profiles was carried out. When a reproducible signal log₂ ratio of 1.0 (twofold difference) was selected in the replicate analyses, over 400 genes were found to be differentially expressed between LECs and BECs. Some examples of the differentially expressed genes have been functionally annotated in Table 1 and a complete list of the differentially expressed genes is provided in Tables 2-4. A complete list of differentially expressed genes containing the GenBank accession numbers and the variation between the expression levels between independently harvested BECs and LECs (signal log₂ ratio ±s.d.) are provided in Tables 3 and 4. The microarray data were validated by Northern blotting or by immunofluorescence for 31 of the selected genes (see FIG. 1).

[0176] Each gene listed in Tables 3 and 4 is identified by a gene accession number which correlates to the sequence of the gene as found in a public genome database such as the GenBank database maintained by NCBI. These sequences are incorporated herein by reference.

TABLE 1
Selected classes of genes differentially expressed in BECs and LECs.

| | Blood vascular EC | Lymphatic EC |
|---|---|---|
| Adhesion molecules | integrin alpha5 | integrin alpha9* |
| | integrin β5, β4* | integrin alpha1 |
| | ICAM-1*, ICAM-2 | macrophage mannose receptor I* |
| | N-cadherin* | |
| | selectin P, selectin E* | |
| | protocadherin 42* | |
| | CD44* | |
| | EphrinB1* | |
| Cytoskeletal proteins | vinculin | desmoplakin I and II* |
| | claudin 7* | adducin gamma |
| | actin, alpha 2 | alpha-actinin-2 associated LIM |
| | profilin 2 | protein* |
| ECM proteins | collagens 8A1*, 6A1*, 4A2/13A1*, | Matrix Gla protein* |
| | 1A2* | |
| | laminin* | |
| | versican* | |
| | proteoglycan 1 | |
| ECM modulation | MMP-1, MMP-10, MMP-14* | TIMP-3 |
| | uPA*, tPA* | |
| | cathepsin C | |
| Receptor tyrosine | VEGFR-1 (sVEGFR-1*) | VEGFR-3* |
| kinases | | Lyn |
| and other protein | | Dyrk3 |
| kinases | | |
| Transcription factors | STAT6* | prox-1* |
| | TFEC* | MEF2C* |
| | MAD-3* | c-maf* |
| | HMGI-C* | forkhead box M1 |
| | JUN* | CREM |
| | GATA2 | ear-3 |
| Growth factors | VEGF-C* | Angiopoietin-2 |
| | Placenta growth factor | |
| Cytokines, chemokines | IL-8*, IL-6* | IL-7* |
| and receptors | stem cell factor* | SDF-1b* |
| | Monocyte chemotactic protein 1 | |
| | UFO/axl* | |
| | CXCR4 | |
| | CCRL2/CKRX* | |
| | IL-4 receptor | |
| Cell cycle | p27* | Cdk-inhibitor p57KIP2* |
| | p21 | cyclin-dependent kinase inhibitor 3, |
| | gadd45 | CIP2 |
| | | cyclin E2* |
| | | cyclin B1, B2* |
| Oxidative stress | thioredoxin reductase beta* | selenoprotein P* |
| Other | Neuropilin-1 | podoplanin* |
| | HNMP-1* | MRC OX2 |
| | endothelial cell protein C/APC | Apolipoprotein D |
| | receptor | Semaphorin 3A* |
| | Rnase A, pancreatic* | fatty acid binding protein 4 |
| | TGF-β | LITAF/Pig7* |
| | LTBP-2 | IGFBP-2* |
| | metallothionein I, II, III | piccolo* |
| | Cyclooxygenase 2* | monoamine oxidase A |
| | clusterin/Apolipoprotein J | neuronal pentraxin II* |
| | neuronal pentraxin I* | |
| Total | 222 genes | 187 genes |

Genes shown in bold were confirmed by Northern blotting or immunofluorescence, and those marked with an asterisk (*) were specifically expressed in only one of the two cell lineages.

[0177] TABLE 2
Known LEC-specific genes

| | | Accession numbers | |
|---|---|---|---|
| Gene | Detection* | starting EST | possible gene |
| CD36 = | Af (S/4, 3) | R20784 | M98399 |
| COL1/TSP receptor, fatty-acid transport | | H54254 | |
| protein | | | |
| beta1-syntrophin | Af (S/4, 5) | AA447177 | L31529 |
| collectin sub-family member 12 | Af (S/4, 5) | R74387 | NM_030781 |
| a disintegrin and metalloprotease | Af (S/4, 3) | AA147933 | NM_003474 |
| domain 12 | | | |
| cytotoxic T-lymphocyte- | Af (S/4, 0) | AI733018 | NM_005214 |
| associated protein 4 | | | |
| niban protein NM_022083 niban | Af (S/3, 7) | AA554814 | NM_052966 |
| protein | | | |
| multi-PDZ-domain-containing | Af (S/3, 5) | AI738919 | NM_032622 |
| protein, LNX | | | |
| MAGE-E1 protein | Af (S/3, 2) | AI435112 | NM_030801 |
| upstream stimulatory factor 1, | Af (S/2, 6) | AA701033 | AB017568 |
| USF1 (genomic match) | | | |
| hairy/enhancer-of-split related | Af (NS/2, 6) | R61374 | NM_012258 |
| with YRPW motif 1 | | | |
| alpha-2,8-polysialyltransferase | Af (S/2, 5) | AI422986 | L41680 |
| semaphorin 6A1 | Af (S/2, 4) | W21965 | NM_020796 |
| guanine nucleotide binding | Af (S/2, 3) | AA738022 | |
| protein (G prot), gamma 2 | | | |
| integral membrane protein 3 | Af (S/2, 3) | AA128019 | NM_030926 |
| similar to mouse glucocorticoid- | Af (S/2, 0) | AI678080 | XM_070471 |
| induced gene 1 | | | |
| YAP65 (Yes-associated protein of | Af (NS/2, 0) | AL048399 | X80507 |
| 65 kDa MW) | | | |
| 17 kDa fetal brain protein | Af (NS/1, 9) | H92988 | NM_022343 |
| Kruppel-like factor 5 | Af (S/1, 8) | AI815057 | NM_001730 |
| calcitonin receptor-like, CGRP | Af (S/1, 7) | AI741128, | NM_005795, L76380 |
| type 1 receptor | | T94540 | |
| fibroblast growth factor 13, | Af (NS/1, 7) | AW014749 | NM_004114 |
| isoform 1A | | | |
| tetraspan NET-6 protein | Af (NS/1, 6) | W22687 | NM_014399 |
| ring finger protein 11 | Af (S/1, 6) | AL079648 | BC020964 |

*Af = Affymetrix, S = specific for LEC, NS = nonspecific (also expressed in BEC), numbers represent log₂ ratio of the signal intensities between BEC and LEC

### Example 2

### Bec-Specific Expression of Genes Involved in Inflammation

[0178] Endothelial cells play an important role in several steps of the inflammatory response. They recruit leukocytes to inflammatory foci and specialized endothelial cells (high endothelial venules) are responsible for the homing of lymphocytes to the secondary lymphoid organs. In addition, endothelial cells modulate leukocyte activation and vice versa, and they can become activated by molecules secreted by the leukocytes. Consistent with their activation in cell culture, the BECs expressed high levels of pro-inflammatory cytokines and chemokines (stem cell factor, interleukin-8, monocyte chemotactic protein 1 (MCP-1)) and receptors (UFO/axl, CXCR4, IL-4R) see Table I. CXCR4 and its ligand, stromal cell-derived factor-1 (SDF-1), play important roles in the trafficking of normal lymphocytes, monocytes, and hematopoietic stem- and progenitor cell, targeted inactivation of either CXCR4 or SDF-1 results in impaired cardiogenesis, hematopoiesis and vascular development (Tachibana, et al., Nature 393:591-594. 1998). SDF-1b was mainly produced by the LECs, suggesting that this chemokine may be involved in LEC-initiated chemotaxis of the CXCR4-expressing cells. Moreover, the reciprocal pattern of expression of CXCR4 and SDF-1 on BECs and LECs suggest that the two cell types use these molecules for paracrine communication.

### Example 3

### Differences in Cell Adhesion, Cell-Cell Interaction and Cytoskeletal Molecules

[0179] The most striking differences detected between the BECs and LECs was the expression of genes involved in cytoskeletal and cell-cell or cell-matrix interactions (see Tables 3 and 4). For example, N-cadherin, which is involved in the interaction of endothelial cells with SMCs and pericytes (Gerhardt, et al., Dev. Dyn. 218:472-479. 2000), was detected specifically in BECs. This is consistent with the fact that the lymphatic capillaries are not ensheathed by SMCs. In immunostaining, N-cadherin was detected exclusively in the BECs, whereas VE-cadherin was present in both cell types (FIG. 2a-d). The cytoplasmic domains of cadherins interact with β-atenin, plakoglobin (γ-catenin) and p120^{ctn}, which link them to the actin cytoskeleton via α-actinin, vinculin, ZO-1, ZO-2 and spectrin (Provost, E. & Rimm, Curr Op. Cell Biol. 11:567-572. 1999). BECs expressed significantly higher levels of β-catenin (FIG. 2e,f) and vinculin, whereas plakoglobin was mostly present on LECs (FIG. 2g,h). Staining of LECs and BECs also revealed a strikingly different organization of the actin cytoskeleton. BECs displayed numerous stress fibers, which in LECs were almost totally absent, and instead a cortical distribution of actin was observed in LECs(FIG. 2i,j).

[0180] Integrins are important mediators of cell adhesion (Giancotti & Ruoslahti, Science 285:1028-1032. 1999). They are transmembrane proteins consisting of two polypeptides, the α and β subunits. Their ectodomains bind extracellular matrix proteins while the cytoplasmic domains interact with the cytoskeleton and with proteins involved in signal transduction. Integrin α5, which acts as a subunit of the fibronectin receptor, mainly was expressed in BECs. By contrast, integrins α1 and α9, which provide subunits for the receptors for laminin and collagen and for osteopontin and tenascin, respectively, were expressed in LECs (FIG. 1a and FIG. 2k,l). In human skin, antibodies against integrin α9 stained lymphatic capillaries specifically, while blood vessel endothelia were negative (FIG. 2m-o). In addition, integrin α9 was detected in arterial smooth muscle cells as previously reported (Palmer, et al., J. Cell Biol. 123:1289-1297. 1993). Interestingly, integrin α9 has been shown to be important for the normal development of the lymphatic system. Mice lacking integrin α9β1 develop respiratory failure due to the accumulation of a milky pleural (presumably lymphatic) effusion and die within 6 to 12 days after birth (Huang, et al., Mol. Cell Biol. 20:5208-5215. 2000).

[0181] BECs, but not LECs, produced both laminin and different types of collagens (Table 4). In co-culture these basement membrane components may be necessary for the adhesion and growth of the LECs (Makinen, T., et al., EMBO J. 20:4762-4773. 2001). In addition, many of the proteins involved in matrix degradation and remodeling, including several matrix metalloproteinases, tissue-type and urokinase plasminogen activator, as well as plasminogen activator inhibitor I were detected mainly in BECs, while the tissue inhibitor of matrix metalloproteinases-3 (TIMP-3) was detected mainly in LECs (Table 3 and FIG. 1). Unlike the other TlMPs, which are soluble, TIMP-3 is a component of the extracellular matrix. Recombinant TIMP-3 has been reported to inhibit endothelial cell migration and tube formation in response to angiogenic factors, and when expressed in a tumor model, it inhibited tumor growth most likely by preventing tumor expansion, release of growth factors from the extracellular matrix, or angiogenesis (Anand-Apte, et al., Biochemistry & Cell Biology 74:853-862. 1996).

[0182] Additional previously unknown genes were identified in the microarray as LEC-specific transcription factors or transmembrane proteins. See Tables 5 and 6.

TABLE 5
Transcription Factors Identified

| | | Accession numbers | |
|---|---|---|---|
| | | | possible |
| Gene | Detection* | starting EST | gene |
| Homologous to Iroquois related | Af (S/4, 2) | AA936528 | not cloned |
| homeobox 2 | | | from |
| | | | human ( [symbol] |
| similar to mouse odd-skipped | Af (S/3, 3) | AI809953 | (19) |
| related 1 zinc-finger TF | | | |
| PAC clone RP4-751H13 from | Af (S/2, 3) | AC004877 | |
| 7q35-qter | | | |
| similar to mouse glucocorticoid- | Af (NS/2) | AI678080 | XM_070471 |
| induced gene 1 | | | |

*Af = Affymetrix, S = specific for LEC, NS = nonspecific (also expressed in BEC), numbers represent log2 ratio of the signal intensities between BEC and LEC

[0183] TABLE 6
Transmembrane Proteins Identified

| | | Accession numbers | |
|---|---|---|---|
| Gene | Detection* | starting EST | possible gene |
| KIAA0626 | Af (S/4, 7) | AB014526 | NM_021647 (14) |
| KIAA0644 | Af (S/3, 9) | AB014544 | NM_014817 (15) |
| unknown protein | Af (S/3, 5) | AI333655 | XM_059074 (16) |
| hypothetical protein | Af (NS/1, 8) | AI733570 | NM_024600 (862) |
| FLJ20898 similar to | Af (NS/1, 7) | AA447940 | AK055654, |
| layilin, unnamed | | | XM_084655 |
| protein product | | | |
| hypothetical protein | Af (NS/3, 2) | AI681538 | NM_022068 (860) |
| FLJ23403 KIAA0062 | | D31887 | XM_046677 (47) |
| mesenchymal stem | Af (S/1, 8) | AW009871 | NM_016647 (17) |
| cell protein DSCD75 | | | |

*Af = Affymetrix, S = specific for LEC, NS = nonspecific (also expressed in BEC), numbers represent log2 ratio of the signal intensities between BEC and LEC

[0184] Additionally, Tables 10 and 11 describe the known LEC genes identified and their accession numbers, and the differentially expressed genes and their accession numbers, respectively, while Table 12 describes other unknown proteins identified in the screen.

### Example 4

### Differential Regulation of LEC Genes by Prox-1

[0185] The mechanisms responsible for the lymphatic differentiation program were investigated. The Prox-1 homeobox transcription factor was found to be expressed specifically in LECs and targeted disruption of Prox-1 in mice was reported to result in the arrest of lymphatic vessel development (Wigle et al., Cell, 98:769-778. 1999). Despite the fact that the prox-1 gene was discovered nearly ten years ago, Prox-1 target genes have not been identified. To determine whether the homeodomain transcription factor Prox-1 contributes to the differentiated LEC and BEC phenotypes, the genes identified above were analyzed for expression in primary BECs and LECs, in the presence and absence of Prox-1 over-expression.

[0186] Adenovirus-mediated gene transfer of prox-1 in primary endothelial cells was used to induce gene expression in the BEC cells. In order to eliminate gene expression changes caused by adenoviral infection, AdLacZ (encoding β-galactosidase) was introduced into BECs as a control.

[0187] A prox-1 cDNA was amplified by RT-PCR using total RNA from human endothelial cells and the primers 5′-GCCATCTAGACTACTCATGAAGCAGCT-3′ (SEQ ID NO: 61) and 5′-GCGCAGAATTCGGCCCTGACCATGACAGCACA-3′ (SEQ ID NO: 62). The PCR product was cloned into the pAMC expression vector, producing N-terminally Myc-tagged Prox-1. The construct was then subcloned into pAdCMV to yield AdProx-1 for adenovirus production. AdProx-1 and AdLacZ virus stocks were produced as described (Laitinen et al., Hum. Gene Ther. 9:1481-1486. 1998). Adenovirally produced Prox-1 migrated with a molecular weight of about 85 kDa and it was also recognized by antibodies against a Prox-1 C-terminal peptide. Mutant Prox-1 N625A/R627A, (asparagine to alanine change at codon 625, arginine to alanine change at codon 627) was made using the QuikChange site-directed mutagenesis kit (Stratagene, La Jolla, Calif.) and the following primers:

(SEQ ID NO: 63)

5′-CTCATCAAGTGGTTTAGCGCTTTCCGTAGTTTTACTAC-3′
and

(SEQ ID NO: 64)

5′-GTAGTAAAACTCACGGAAGCGCTAAACCACTTGATGAG-3..

[0188] Human dermal microvascular endothelial cells, coronary artery endothelial cells (CAECs), saphenous vein endothelial cells (SAVECs), BECs and LECs were plated 24 hours before adenoviral infection at a density of 8,000 cells/cm² and infected for 1 hour in serum-free medium at 50-100 PFU/cell. At the end of the incubation period the cells were washed and then cultured in complete medium for 20-24 hours. Total RNA isolation and array hybridization were performed as described above.

[0189] Titration experiments showed that infection of human microvascular endothelial cells with AdProx-1 or AdLacZ led to nuclear expression of the adenovirus-encoded protein in >90% of the cells at 24 hours post-infection. To investigate the changes in gene expression induced by Prox-1, human cDNA filter arrays were used, which contain about 1,000 genes-known to be important for general cellular metabolism as wells as genes specifically implicated in the regulation of cardiovascular function or hematopoiesis. AdProx-1 up-regulated the expression of 28 LEC genes and down-regulated 63 BEC genes, (see Table 7 below), which was confirmed by Northern blotting for 10 of 11 selected genes. When compared with genes differentially expressed in LECs and BECs, 15 genes (i.e., about 30%) modulated by Prox-1 were found to be differentially expressed between cultured LECs and BECs, suggesting that Prox-1 is a major regulator of lymphatic endothelial cell identity.

TABLE 7
Prox-1 Regulated LEC/BEC Genes

| | | | ¹signal log | |
|---|---|---|---|---|
| Gene | Accession numbers | | ratio | ²s.d. |
| LEC-specific induced by AdProx-1 (28 genes) | | | | |
| cyclin E2 | AF091433 | NM_057735 | 4.95 | 1.17 |
| cysteine and glycine-rich protein 2 | U57646 | NM_001321 | 4.58 | 0.36 |
| Cdk-inhibitor p57KIP2 | U22398 | NM_000076 | 3.77 | 0.68 |
| paternally expressed 10 | AB028974 | NM_015068 | 3.54 | 0.95 |
| thromboxane A2 receptor | D38081 | NM_001060 | 2.32 | 0.13 |
| B-myb | X13293 | NM_002466 | 2.11 | 0.28 |
| retinoblastoma-associated protein HEC | AF017790 | NM_006101 | 1.86 | 0.13 |
| cholesterol 25-hydroxylase | AF059214 | NM_003956 | 1.86 | 0.56 |
| G protein-coupled receptor, family C, group 5, member B | AC004131 | | 1.83 | 0.32 |
| thymidine kinase 1 | M15205 | NM_003258 | 1.80 | 0.39 |
| CREM (cAMP responsive element modulator) | S68134 | NM_001881 | 1.78 | 0.30 |
| alpha-actinin-2-associated LIM protein | AF002282 | NM_014476 | 1.77 | 0.42 |
| desmoplakin (DPI, DPII) | AL031058 | | 1.74 | 1.03 |
| MCM6 minichromosome maintenance deficient 6 | D84557 | NM_005915 | 1.72 | 0.06 |
| erythrocyte membrane protein band 4.9 (dematin) | U28389 | NM_001978 | 1.71 | 0.25 |
| GTP cyclohydrolase 1 | U19523 | NM_000161 | 1.61 | 0.04 |
| KIAA0186 gene product | D80008 | NM_021067 | 1.47 | 0.11 |
| cell division cycle 2 protein | X05360 | NM_001786 | 1.35 | 0.43 |
| hypothetical protein from clone 643 | AF091087 | NM_020467 | 1.25 | 0.22 |
| ubiquitin carrier protein E2-C | U73379 | NM_007019 | 1.23 | 0.12 |
| mitotic checkpoint kinase Mad3L | AF053306 | NM_001211 | 1.22 | 0.47 |
| V-Erba Related Ear-3 Protein | HG3510-HT3704 | | 1.20 | 0.20 |
| glycogen phosphorylase (PYGL) | AF046798 | | 1.16 | 0.54 |
| fms-related tyrosine kinase 4, VEGFR-3 | X69878 | NM_002020 | 1.10 | 0.00 |
| BTB (POZ) domain containing 3 | AB023169 | NM_014962 | 1.10 | 0.08 |
| SMC4 structural maintenance of chromosomes 4-like 1 | AB019987 | NM_005496 | 1.09 | 0.59 |
| (yeast) | | | | |
| high-mobility group protein 2 | X62534 | NM_002129 | 1.07 | 0.04 |
| alpha topoisomerase | L47276 | | 1.04 | 0.49 |
| BEC-specific suppressed by AdProx-1 (63 genes) | | | | |
| neuropilin-1 | AF016050 | NM_003873 | −3.99 | 0.42 |
| ras-related C3 botulinum toxin substrate 2, RAC2 | M64595 | NM_002872 | −3.87 | 0.47 |
| tripartite motif-containing 22 | X82200 | NM_006074 | −3.56 | 0.28 |
| small inducible cytokine A2 (monocyte chemotactic protein | M26683 | NM_002982 | −3.56 | 0.03 |
| 1) | | | | |
| zinc finger protein 238 | AJ223321 | NM_006352 | −3.08 | 0.13 |
| uPA | X02419 | | −3.05 | 0.02 |
| transcription factor EC | D43945 | NM_012252 | −3.04 | 0.08 |
| RNase A, pancreatic | D26129 | NM_002933 | −2.72 | 0.02 |
| vitamin A responsive; cytoskeleton regulated | AF070523 | NM_006407 | −2.51 | 0.6 |
| interleukin 6 | X04430 | NM_000600 | −2.42 | 0.63 |
| Rho GDP dissociation inhibitor (GDI) beta | X69549 | NM_001175 | −2.42 | 0.03 |
| matrix metalloproteinase 14 | X83535 | NM_004995 | −2.37 | 0.08 |
| E3 ubiquitin ligase SMURF2 | AA630312 | NM_022739 | −2.22 | 0.06 |
| death receptor 6 | AF068868 | NM_014452 | −2.16 | 0.61 |
| protein C receptor, endothelial (EPCR) | L35545 | NM_006404 | −2.09 | 0.14 |
| hematopoietic and neural membrane protein (HNMP-1) | U87947 | NM_001425 | −2.08 | 0.63 |
| KIAA0836 | AB020643 | | −2.07 | 0.44 |
| chondroitin sulfate proteoglycan 2 (versican) | X15998 | NM_004385 | −1.99 | 0.65 |
| regulator of G-protein signaling 4 | AI267373 | NM_005613 | −1.93 | 0.54 |
| phosphofructokinase, muscle | U24183 | NM_000289 | −1.93 | 0.11 |
| IGF-II mRNA-binding protein 3 | U97188 | NM_006547 | −1.9 | 0.23 |
| neuronal cell adhesion molecule Nr-CAM/hBRAVO | AB002341 | NM_005010 | −1.89 | 0.13 |
| cell surface glycoprotein CD44 | L05424 | | −1.84 | 0.12 |
| plasminogen activator inhibitor-1 | J03764 | NM_000602 | −1.83 | 0.33 |
| AF1Q protein | U16954 | NM_006818 | −1.79 | 0.23 |
| Homo sapiens clone 24674 mRNA sequence | AF070578 | | −1.76 | 0.01 |
| nicotinamide N-methyltransferase | U08021 | NM_006169 | −1.74 | 0.49 |
| lactate dehydrogenase B | X13794 | | −1.73 | 0.08 |
| KIAA0537 gene product | AB011109 | NM_014840 | −1.73 | 0.08 |
| LIM domain protein | X93510 | NM_003687 | −1.67 | 0.11 |
| lymphocyte antigen 75, DEC-205 | AF011333 | NM_002349 | −1.61 | 0.08 |
| natural killer cell transcript 4 | AA631972 | NM_004221 | −1.59 | 0.05 |
| phospholipase A2 | M72393 | | −1.58 | 0.41 |
| R-ras | M14949 | | −1.56 | 0.1 |
| adenylyl cyclase-associated protein 2 | N90755 | NM_006366 | −1.55 | 0.08 |
| leupaxin | AF062075 | NM_004811 | −1.53 | 0.3 |
| signal transducer and activator of transcription 6 (STAT6) | AF067575 | | −1.51 | 0.45 |
| LYL-1 | M22637 | | −1.51 | 0.14 |
| selectin P | M25322 | NM_003005 | −1.47 | 0.37 |
| protein kinase, cAMP-dependent, catalytic, beta | M34181 | NM_002731 | −1.43 | 0.49 |
| TRAM-like protein | D31762 | NM_012288 | −1.42 | 0.43 |
| guanylate binding protein 2, interferon-inducible | M55543 | NM_004120 | −1.41 | 0.51 |
| intercellular adhesion molecule 2 | X15606 | NM_000873 | −1.38 | 0.13 |
| proteoglycan 1, secretory granule | X17042 | NM_002727 | −1.35 | 0.47 |
| tropomyosin 1 (alpha) | Z24727 | NM_000366 | −1.32 | 0.1 |
| fibroblast activation protein, alpha subunit | U09278 | NM_004460 | −1.25 | 0.12 |
| hypothetical protein DKFZp564D0462 | AL033377 | | −1.25 | 0.23 |
| mitogen-activated protein kinase-activated protein kinase 3 | U09578 | NM_004635 | −1.2 | 0.35 |
| amyloid beta (A4) precursor protein-binding | U62325 | | −1.2 | 0.18 |
| AXL receptor tyrosine kinase | M76125 | NM_001699 | −1.19 | 0.3 |
| integrin alpha 5 | X06256 | NM_002205 | −1.18 | 0.02 |
| prion protein (PrP) | U29185 | | −1.18 | 0.07 |
| TRAF family member-associated NFKB activator | U59863 | NM_004180 | −1.17 | 0.13 |
| annexin VI | Y00097 | NM_001155 | −1.16 | 0.12 |
| transcobalamin II | L02648 | NM_000355 | −1.16 | 0.12 |
| sushi-repeat-containing protein, X chromosome | U61374 | NM_006307 | −1.13 | 0.09 |
| bone morphogenetic protein 6 | M60315 | NM_001718 | −1.13 | 0.39 |
| hypothetical protein from clones 23549 and 23762 | U90908 | NM_021226 | −1.1 | 0.6 |
| retina cDNA randomly primed sublibrary, EST | W28438 | | −1.09 | 0.36 |
| TU3A protein | AF035283 | | −1.06 | 0.29 |
| keratin 7 | AJ238246 | NM_005556 | −1.05 | 0.53 |
| latent transforming growth factor beta binding protein 2 | Z37976 | NM_000428 | −1.04 | 0.13 |
| N-cadherin | M34064 | NM_001792 | −1.02 | 0.12 |
| cDNA DKFZp564J0323 (from clone DKFZp564J0323) | AL049957 | | −1.01 | 0.22 |

¹The change is expressed as the log₂ ratio.
²Standard deviation of the change in the expression level.

[0190] The ability of recombinant Prox-1 expression in BECs (where it is normally absent) to modify the transcriptional program of these cells towards the lymphatic endothlial cell phenotype was also investigated. The control, AdLacZ, did not significantly alter the expression of BEC- or LEC-specific transcripts as determined by oligonucleotide microarray analyses. By contrast, AdProx-1 increased expression of many LEC-specific mRNAs, such as VEGFR-3, p57Kip2, desmoplakin I/II and alpha-actinin-associated LIM protein (see Table 8). Suprisingly, Prox-1 also suppressed the expression of about 40% of genes characteristically expressed in BECs, such as the transcription factor STAT6, the UFO/axl receptor tyrosine kinase, neuropilin-1 (NRP-1), monocyte chemoattractant protein-1 (MCP-1) and integrin α5 (see Table 7 and Table 8). These gene expression results are in agreement with the in vivo studies of lymphatic vessels. For example, VEGFR-3 and desmoplakin I/II are found in the lymphatic endothelium (Ebata et al., Microvasc. Res. 61:40-48. 2001; Kaipainen et al., Proc. Natl. Acad. Sci. U.S.A. 92: 3566-70. 1995), and the VEGR co-receptor NRP-1, which was suppressed by Prox-1 in the BECs, was found to be expressed in blood vessels, but not in lymphatic vessels in mouse skin.

TABLE 8
Examples of LEC- and BEC-specific genes regulated by Prox-1

| | LEC-specific, up-regulated | BEC-specific, down-regulated |
|---|---|---|
| Adhesion molecules | | Integrin alpha 5 |
| | | ICAM-2 |
| | | CD44 |
| | | Nr-CAM |
| | | P-selectin |
| Cytoskeletal proteins | Desmoplakin I and II | leupaxin |
| | alpha-actinin-2 associated LIM | |
| | protein | |
| ECM proteins | | versican |
| | | proteoglycan 1 |
| ECM proteins | | versican |
| | | proteoglycan 1 |
| ECM modulation | | MMP-14 |
| | | uPA |
| | | PAI-I |
| Receptor tyrosine kinases | VEGFR-3 | UFO/axl |
| Transcription factors | CREM | STAT6 |
| | ear-3 | |
| Cytokines, chemokines | | TFEC |
| and receptors | | IL-6 |
| | | MCP-1 |
| Cell cycle control | p57Kip2 | |
| | cyclin E2 | |
| Other | cholesterol 25-hydroxylase | Neuropilin-1 |
| | thromboxane A2 receptor | endothelial cell protein C |
| | | receptor |
| Total | 28 genes | 63 genes |
| | (19% of LEC-specific genes) | (38% of BEC-specific genes) |

Genes shown in bold were confirmed by Northern blotting or RT-PCR.

[0191] In order to determine whether the Prox-1-induced changes in gene expression were cell-type specific, changes in gene expression after AdProx-1 or AdLacZ infection were analyzed in additional endothelial cell types, i.e., coronary artery endothelial cells (CAECS) and saphenous vein endothelial cells (SAVECs), as well as a non-endothelial cell type, i.e., amniotic epithelial cells (AEC). In all of these cell types, AdProx-1 strongly up-regulated Cyclins E1 and E2, Histone H2B, and PCNA. However, AdProx-1 induced VEGFR-3 expression only in CAECs and SAVECs, and not in AECs.

[0192] These results are consistent with the lack of lymphatic differentiation in Prox-1-deficient embryos. Interestingly, the expression of Prox-1 in primary endothelial cells leads to up-regulation of VEGFR-3 receptor tyrosine kinase, which is specific for the lymphatic endothelium after midgestation and is essential for proper lymphatic growth and function (Karkkainen and Petrova, Oncogene 19:5598-5605. 2000). For example, inactivating mutations of VEGFR-3 in humans and mice lead to lymphatic hypoplasia and lymphedema (Jeltsch et al., Science 276:1423-1425. 1997; Karkkainen et al., Nat. Genet., 25:153-159. 2000; Karkkainen et al, Trends Mol. Med. 7:18-22. 2001). The results described above therefore suggest that the up-regulation of VEGFR-3 expression by Prox-1 is one of the key pathways involved in the establishment of lymphatic endothelial cell identity and also suggest that the distinct phenotypes of cells in the adult vascular endothelium are plastic and sensitive to transcriptional reprogramming, which is useful in the therapeutic methods of the invention affecting endothelial cells.

### Example 5

### Ex-vivo Cell Stimulation and Gene Therapy for Lymphedema with AdProx-1 Transfected Cells

[0193] The ability of Prox-1 to regulate genes specifically involved in LEC development provides a means for treatment of individuals exhibiting a LEC disorder or condition resulting from either an increase or decrease in LEC gene expression levels. Prox-1 upregulation is useful in promoting LEC development as a treatment for LEC disorders characterized by an under-developed lymphatic system of a condition characterized by a risk of wider-development such as lymphedema. Conversely, Prox-1 inhibition is useful in downregulating LEC development as a treatment for LEC disorders characterized by an over-developed lymphatic system such as lymphedema. It is known in the art that ex vivo transfection of cells and subsequent transfer of these cells to patients is an effective method to upregulate in vivo levels of the specific gene transferred and to provide relief from a disease resulting from under-expression of the gene(s) (Gelse et al., Arthritis Rheum. 48:430-41. 2003; Huard et al, Gene Ther 9:1617-26. 2002; Kim et al., Mol. Ther. 6:591-600 2002).

[0194] To develop a therapy for treating irregularities of LEC development, endothelial cells, such as CAECs, SAVECs, LECs or BECs, are isolated from individuals experiencing an LEC disorder (e.g. lymphedema) and then placed in an appropriate culture medium (see above) to promote the growth and viability of the cells. The cells are then transfected as described with the AdProx-1 vector as described above to initiate LEC differentiation of the non-LECs in vitro and to promote growth of the LECs in culture. These transfected cells are then transferred into an affected patient in therapeutically effective numbers to promote LEC expansion in vivo. In preferred embodiments, the manipulated cells are autologous cells. These cells are delivered by one or more administrations typically involving injection. The cells are delivered at a local site of an LEC disease or disorder such as lymphedema or systemically.

[0195] Addition of the Prox-1 transfected cells to patients with lymphedema provides supplementary LECs that are incorporated into the lymphatic network to promote lymphatic development and effectuate lymph clearance to relieve the symptoms of lymphedema. It is contemplated that a method comprising AdProx-1 transfection into endothelial cells and administration of transfected cells is useful in the treatment of any disease characterized by an alteration in LEC numbers or activity, such as lymphedema, lymphangioma, lymphangiomyeloma, lymphangiomatosis, lymphangiectasis, lymphosarcoma, and lymphangiosclerosis. Additionally, such methods are useful in ameliorating a symptom (e.g., lymph-induced swelling in the case of lymphedema) associated with such diseases.

### Example 6

### Characterization of LEC-Specific Genes

[0196] LEC-specific genes were further analyzed using a subtraction library between the LEC and BEC genes. To construct the library, total RNA was isolated as previously described and 5 μg of total RNA was pre-amplified using a SMART™ PCR cDNA synthesis kit (BD Biosciences Clontech). After RsaI-digestion, PCR-Select cDNA subtraction was carried out in both directions, resulting in selective amplification of differentially expressed sequences, and subtracted LEC and BEC cDNA libraries were prepared (BD Biosciences Clontech). Subtractive hybridization was performed with a 1 (tester): 30 (driver) ratio in both directions and subtracted CDNA pools were amplified by PCR. Forty ng of the purified PCR-amplified product were cloned into the pAtlas vector (PUC-based vector) for the construction of subtracted libraries, although a number of other vectors could be used in the construction, as would be known in the art.

[0197] Differential screening of the subtracted LEC-specific library was carried out as described in the PCR-Select Differential Screening Kit User Manual (BD Biosciences Clontech). The LEC-specific subtracted library was plated and individual bacterial clones were picked and grown. After DNA extraction, the inserts were amplified by PCR and used for sequencing. An aliquot of each PCR-amplified insert was also arrayed onto a nylon membrane and used for hybridization with ³²P-labeled cDNA probes. The results from the hybridizations with subtracted LEC-specific (tester) and subtracted BEC-specific (driver) cDNA probes were used for the differential expression analyses.

[0198] BLAST (The Basic Local Alignment Search Tool) was used to compare the sequences against nucleotide, protein and EST sequence databases. For unknown sequences, EST contigs were searched and open reading frames were predicted using ORF finder. Protein domain architectures were analyzed using Pfam (Protein families database of alignments and HMMs) and Smart (Simple Modular Architecture Research Tool).

[0199] The nucleotide sequences of clones that were differentially expressed in LECs versus BECs were analyzed in the manner described above. Several of the EST or unknown gene fragments detected in the first screen have been investigated further to determine their sequence similarities to known gene sequences and to identify any open reading frames and functional domain similarities. The results are collected in Table 9.

TABLE 9

| Clone | | | | |
|---|---|---|---|---|
| designation | | Human Genome | KIAA Designation # | Expected Gene |
| and (SEQ ID NO) | EST | Accession # | and (SEQ ID NO) | Function |
| LE000100001_A06 | AB014526 | NM_021647 | KIAA0626 | Ig domain motif, |
| (SEQ ID NO: 61) | | | SEQ ID NO: 14 | likely cell adhes [symbol] |
| | | | | function |
| LE0000100050_A01 | AB014544 | NM_014817 | KIAA0644 | Leucine rich moti [symbol] |
| (SEQ ID NO: 59) | | | SEQ ID NO: 15 | cell adhesion |
| LE0000100055_H05 | | | | activity |
| | AI333655 | XM_059074 | no KIAA, | Leucine rich |
| | | | designated hLyrp | repeats, cell |
| | | | SEQ ID NO: 16 | adhesion protein |
| | AI681538 | NM_016647 | SEQ ID NO: 17 | Similar to |
| | | | | mesenchymal stem |
| | | | | cell protein |
| | AA447940 | XM_084655 | SEQ ID NO: 45 | similar to layili |
| | | | | likely cell adhes |
| | | | | function |
| LE000100017_C02 | XM_046677 | D31887 | KIAA0062 | Zinc transporter |
| (SEQ ID NO: 55) | | | SEQ ID NO: 47 | motif, metal ion |
| | | | | transport |
| LE0000100049_E10 | XM_047672 | XM_047672 | KIAA1673 | RNA-binding regio |
| LE0000100054_F09 | | | SEQ ID NO: 26 | similar to RNA |
| LE0000100056_F07 | | | | binding protein |
| SEQ ID NOs: | | | | |
| LE0000100053_A06 | AI761647 | NM_015147 | KIAA0582 | |
| SEQ ID NO: 56 | | | SEQ ID NO: 49 | |
| LE0000100055_G10 | D14657 | NM_014736 | KIAA0101 | |
| LE0000100046_C12 | | | SEQ ID NO: 51 | |
| SEQ ID NOs: 57-58 | | | | |

[0200] Several of the LEC-specific genes have been found to correspond to KIAA gene sequences, which are large nucleotide EST clones encoding unknown human proteins. (Kazusa DNA Research Institute, 1532-3, Yana Kisarazu, Chiba, 292-0812, Japan). These LEC-specific genes were further analyzed in several available databases to determine the existence of species homologs and the percent similarity in these homologs and also to reveal amino acid sequences that demonstrate similarity to conserved protein domains.

[0201] Analyses of the LEC clone sequences was performed using the HomoloGene database maintained by the U.S. National Center for Biotechnology Information offered by the National Institutes of Health to determine species homologs and orthologs and their percent similarity to the newly isolated human LEC-specific genes. Analyses of the sequences was performed using a resource of curated and calculated homologs for genes as represented by UniGene or by annotation of genomic sequences, generally comparing EST and mRNA sequences from UniGene, as well as transcripts extracted from annotated genomic sequences. (Zhang, et al., J. Comp. Biol. 7:203-14. 2000). The best match for a nucleotide sequence in one organism to a nucleotide sequence in a second organism is based on the degree of similarity between the two sequences, with a minimum alignment of 100 base pairs. The similarity between the two sequences was determined by an alignment score. The alignment score for a sequence pair is the sun of the similarity scores of the sections of the two sequences that aligned.

[0202] HomoloGene analyses indicate that human LEC genes corresponding to KIAA0626, KIAA0644, and KIAA0062, are homologous to EST and unknown gene sequences in mouse (all), rat (KIAA0062, KIAA0644), cow (KIAA0062), pig (KIAA0626, KIAA0644) and Xenopus (KIAA0644). The clones showed approximately 80% (±3%) similarity to the genes identified as homologs by HomoloGene, with KIAA0644 demonstrating as high as 86% homology to pig EST sequence BE233028.1 and as low as 72% similarity to an X. laevis gene.

[0203] Analyses of the LEC genes using Pfam comparison revealed that nucleotide sequences corresponding to KIAA0626 (SEQ ID NO: 14), KIAA0644 (SEQ ID NO: 15), hLyrp (SEQ ID NO: 16), XM_{—}084655 (SEQ ID NO: 45) and KIAA0062 (SEQ ID NO: 47), showed nucleotide sequence motifs characteristic of encoded transmembrane domains, indicating that the corresponding polypeptides (whose amino acid sequences are set out in SEQ ID NOS: 31, 32, 33, 46 and 48, respectively) are expressed on the cell surface. KIAA1673, KIAA0582 and KIAA0101 do not demonstrate an apparent transmembrane domain and are expected to be cytoplasmic or nuclear proteins. Tissue expression assayed by Northern blot reveals that KIAA0101 is detectable in kidney, thymus, colon and small intestine while KIAA0582 is expressed strongly in heart, skeletal muscle, and ovary, less in kidney and placenta, and more weakly in brain, lung, thymus, small intestine and prostate.

[0204] Northern blot analysis of the KIAA0626 transcript indicates that KIAA0626 is expressed specifically in LEC and is found in heart, skeletal muscle and kidney. In situ analysis demonstrates KIAA0626 expression in mouse embryonic day 11 (E11) embryos in the intersomitic tissue and pericytes surrounding the blood vessels, and in the yolk sac vessels, endothelial cells and in the surrounding pericytes. The polynucleotide sequence of KIAA0626 (SEQ ID NO: 14) encodes a 409 amino acid (409 aa) protein (SEQ ID NO: 31) possessing a signal sequence (at amino acids 1-29), an Ig superfamily domain (approximately aa 61-127), a short transmembrane region ( about aa 153-175) and a long 234-amino-acid cytoplasmic domain from about amino acids 176-409. The presence of an Ig domain is expected to assist in binding of the protein to its ligand while the long cytoplasmic domain indicates that KIAA0626 may be involved in intracellular signaling in LECs.

[0205] KIAA0644 (SEQ ID NO: 15) is detected by Northern blot analysis primarily in heart and brain tissue. In situ assay of E10 mouse embryos shows KIAA0644 expression throughout the embryo. The KIAA0644 polynucleotide encodes a 811-amino-acid polypeptide (SEQ ID NO: 32) demonstrating a total of 13 leucine rich regions. Leucine-rich regions comprise a short sequence motif of approximately 20-28 amino acids which are present in proteins functioning as cell-adhesion and receptor molecules. Leucine-rich regions, designated below as LRRNT and LRRCT are often flanked by cysteine-rich domains. The KIAA0644 protein contains a leucine-rich N-terminal region (LRRNT: aa 26-54), 11 internal leucine-rich regions (LRR1: aa84-107, LRR2: aa108-131, LRR3: aa132-155, LRR4: aa156-179, LRR5: aa180-203, LRR6: aa204-223, LRR7: aa230-253, LRR8: aa254-277, LRR9: aa278-301, LRR10: aa302-325, and LRR11: aa326-349) and a C-terminal leucine-rich region (LRRCT) from about amino acids 359-404. The KIAA0644 transmembrane domain spans approximately amino acids 696-718, leaving a cytoplasmic domain of about 95 amino acids, from aa719-8 11. The leucine-rich regions of the KIAA0644 gene implicate it in protein-protein interactions characteristic of cell-adhesion or ligand binding.

[0206] The hLyrp (SEQ ID NO: 16) mRNA is detectable in skeletal muscle tissue and is localized by in situ hybridization to the lymphatic vessels when compared to Prox-1 staining in E11 and yolk sac of mouse embryos. Similar to KIAA0644, the hLyrp protein (SEQ ID NO: 33) contains a series of leucine-rich regions beginning at the leucine-rich N-terminal region (LRRNT: aa27-55) extending through 5 internal leucine-rich regions (LRR1: aa57-80, LRR2: aa81-104, LRR3: aa105-128, LRR4: aa129-153, LRR5: aa154-176) and ending with a C-terminal leucine-rich region (LRRCT) from approximately aa186-240. The hLyrp polypeptide also contains a transmembrane domain from amino acids 249-272, leaving a short cytoplasmic domain of 22 amino acids. The presence of several consecutive-leucine-rich regions in the hLyrp polypeptide indicates that the polypeptide functions as a cell-adhesion molecule and/or a cell surface receptor.

[0207] Several additional sequences shown in Table 3 were isolated with full-length mRNA sequences which are expressed specifically in LECs. Domain prediction of these sequences indicates that KIAA0711 (SEQ ID NO: 81 and 82) contains a BPB/POZ domain spanning approximately amino acids 171-269, this domain is expected to function in protein-protein interactions. POZ domains appear in transcriptional co-factors such as zinc-finger proteins that mediate transcriptional repression and interact with components of histone deacetylase complexes. KIAA0711 also has three Kelch repeats, spanning amino acids 386-437, 439-480, and 484-525, and Kelch motifs have been implicated in the formation of beta sheet structures. Additionally, KIAA0711 mRNA is expressed in a variety of tissues. From highest expression levels to lowest, KIAA0711 mRNA is found in brain and kidney; liver; spleen; lung; ovary, pancreas and heart; smooth muscle and testis. Because this expression pattern was obtained from a single run of RT-PCR ELISA, the expression profile has a chance to include significant run-to-run variations. Accordingly, the expression profiles are most suitable for screening genes for tissue-specific expression on a qualitative level. If more accurate quantitative expression profiles are required, more statistically reliable approaches should be employed (e.g., multiple RT-PCR-ELISA measurements, DNA chip analyses, RNA blot analyses, and the like).

[0208] Domain mapping of the sequence corresponding to cDNA DKFZp5640222 (SEQ ID NO: 93) indicates the presence of an N-terminal signal peptide (amino acids 1-23), two internal repeat domains and:an olfactomedin domain (amino acids 361-616), which is detected in proteins such as myocilin, pancortin, and latrophilin. Mutations in the OLF domain-of myocilin are associated with glaucoma

[0209] Domain mapping of KIAA1233 (SEQ ID NO: 111) indicates that the KIAA sequence contains six thrombospondin type I repeats, which are found in extracellular matrix proteins and are implicated generally in cell-cell interactions, and more specifically in the complement pathway, in the inhibition of angiogenesis, and in apoptosis. KIAA1233 also contains three immnunoglobulin C-2 type domains, similar to many glycoproteins. Proteins possessing both thrombospondin repeats and immunoglobulin domains are also involved in intracellular interactions, such as cell-adhesion and apoptosis. From highest expression levels to lowest, KIAA1233 mRNA is found in the spinal cord; heart, general brain, lung, liver, kidney, pancreas, various regions of the brain (amygdala, corpus callosum, caudate nucleus, hippocampus, substantia nigra, thalamus, and subthalamic nucleus) and fetal liver; fetal brain; spleen; and testis.

[0210] The KIAA0846 (SEQ ID NO: 188) protein contains motifs found in guanine nucleotide exchange factors and is thus probably an intracellular protein, perhaps a signaling protein. KIAA0846 also exhibits two EF-hand motifs found in signalling proteins (e.g. calmodulin, S100B), which undergo a calcium-dependent conformational change and are also found in buffering/transport proteins. From highest expression levels to lowest, KIAA0846 mRNA is found in kidney; heart, brain and lung; liver, spleen and ovary; pancreas, smooth muscle and testis.

[0211] Protein FLJ13110 (SEQ ID NOS: 207 and 208) exhibits a TB2/DP1, HVA22 family protein domain and two short transmembrane regions (amino acids 4-22 and 43-65 of SEQ ID NO: 207). The HVA22 family includes members from a wide variety of eukaryotes, including the TB2/DP1 (deleted in severe familial adenomatous polyposis) protein which is deleted in severe forms of familial adenomatous polyposis, an autosomal dominant oncological inherited disease.

[0212] The LEC-specific gene screen also identified protein KIAA0937 (SEQ ID NOS: 211 and 212). KIAA0937 contains WWE domains (from approximately amino acids 30-112, and 113-189 of SEQ ID NO: 211) which is named after three of its conserved residues and is predicted to mediate specific protein-protein interactions in ubiquitin and ADP ribose conjugation systems. KIAA0937 is also predicted to contain a zinc finger domain (from amino acids 443-501 of SEQ ID NO: 211) and is expected to be an intracellular transcription factor. From highest expression levels to lowest, KIAA0937 mRNA is found in the spinal cord; the subthalanic nucleus and cerebellum of the brain; the brain in general (including the amygdale, corpus callosum and fetal brain) and ovary; fetal liver, heart, lung, kidney, spleen and parts of the brain (caudate nucleus and hippocampus); testis and pancreas; and smooth muscle.

[0213] KIAA0952 (SEQ ID NO: 241 and 242) contains a Broad-Complex, Tramtrack and a Bric-a-brac domain, also known as a POZ (poxvirus and zinc finger) domain. These domains are known to be protein-protein interaction domains found at the N-termnini of several C2H2-type transcription factors, as well as Shaw-type potassium channels. The known structure of these domains reveals a tightly intertwined dimer formed via interactions between an N-terminal polypeptide strand and helix structures.

[0214] The protein designated KIAA0429 (SEQ ID) NOS: 391 and 392) is similar to metastasis suppressor protein and contains an actin-binding WH2 domain from approximately amino acids 467-484, as well as a proline-rich region from amino acids 348-466.

[0215] Protein FLJ23403 (amino acid sequence, SEQ ID NO:859; polynucleotide sequence, SEQ ID NO:860) shows approximately 85% homology to an unknown mouse protein (GenBank Acc. No. XM_{—}129000) and contains a series of four transmembrane domains spanning amino acids 44-66, 86-108, 115-137 and 452-474.

[0216] Additional LEC-specific, upregulated genes include previously unidentified proteins KIAA0186 (SEQ ID NOS: 221 and 222), KIAA0513 (SEQ ID NOS: 235 and 236) and the protein designated FLJ13910 (SEQ ID NOS: 293 and 294).

[0217] The manipulation of lymphatic endothelial-cell-specific molecules is expected to be applicable to treatments of LEC diseases disorders associated with tissue edemas. Without wishing to be bound by theory, manipulation of such molecules is expected to modulate endothelial cell-cell or cell-matrix protein interactions or to affect transendothelial transport thereby altering the state of fluid transport across the lymphatic vessel wall. Further, such molecules provide targets for the delivery of therapeutic compounds, such as growth factors, mitogens, and the like, as well as cytostatic or cytotoxic agents known in the art. These therapeutic compounds are targeted to such cells by associating a therapeutic agent with, e.g., a binding partner (such as an antibody) of the LEC surface marker. The transmembrane proteins identified herein, in particular the leucine-rich proteins, also provide useful targets for modulating cell adhesion events integral to lymph clearance.

### Example 7

### Microarray Analysis to Detect LEC- and Lymph-Related Disorders

[0218] The LEC-specific genes identified herein are useful in the detection of LEC in vivo and in determining the extent of the lymphatic vasculature in a sample. The LEC-specific genes are also expected to be useful in diagnosing lymphedema and other LEC-related disorders.

[0219] Another aspect of the invention is a composition comprising a plurality of polynucleotide probes for use in detecting gene expression pattern(s) characteristic of particular cell type(s) and for detecting changes in the expression pattern of a particular cell type, e.g., lymphatic endothelial cells. The term “polynucleotide probe” is used herein to refer to any one of the nucleic acid sequences listed in SEQ ID NO: 1-30, 45, 47, 49 and 51, or any fragment thereof or a nucleic acid sequence encoding an amino acid sequence listed in SEQ ID NOS: 31-44, 46, 48, and 50, or a fragment thereof. Preferably, the fragment is at least 10 nucleotides in length; more preferably, it is at least 20 nucleotides in length. Such a composition is employed for the diagnosis and treatment of any condition or disease in which the dysfunction or non-function of lymphatic endothelial cells is implicated or suspected. In one embodiment, the present invention provides a composition comprising a plurality of polynucleotide probes, wherein at least a subset of the polynucleotide probes comprises at least a portion of an expressed gene isolated from a population of LEC-specific genes identified above. Also contemplated is a composition comprising a plurality of polynucleotide probes, with at least a subset of such probes each comprising a unique sequence selected from the group of SEQ ID NOs: 1-30, 45, 47, 49 and 51. Preferably, the composition comprises a subset of at least 3 polynucleotides, each having a different sequence selected from the group of SEQ ID NOs: 1-30, 45, 47, 49 and 51. Also preferred are compositions comprising at least 5, at least 7, at least 9, at least 15, at least 20, or at least 25 distinct polynucleotides having sequences selected from the group of SEQ ID NOs: 1-30, 45, 47, 49 and 51.

[0220] The composition is particularly useful as a set of hybridizable array elements in a microarray for monitoring the expression of a plurality of target polynucleotides. The microarray comprises a substrate and the hybridizable array elements. The microarray is used, for example, in the diagnosis and prognosis of a disease derived from aberrant lymphatic endothelial cell activity, such as lymphedema, lymphangioma, lymphangiomyeloma, lymphangiomatosis, lymphangiectasis, lymphosarcoma, and lymphangiosclerosis. Compositions may be useful in identifying more than one cell type and may be useful in the diagnosis and prognosis of more than one disease, disorder or condition. Further, useful information is obtained from those probes yielding a signal and from those probes not yielding a signal.

[0221] A polynucleotide comprising the sequence of any one of SEQ ID NOS: 1-30, 45, 47, 49 and 51 may be used for the diagnosis of conditions or diseases with which the abnormal expression of any one of the genes encoded by SEQ ID NOS: 1-30, 45, 47, 49 and 51 is associated. For example, a polynucleotide comprising any one of the sequences set forth in SEQ ID NOS: 1-30, 45, 47, 49 and 51 may be used in hybridization or PCR assays of fluids or tissues (e.g.,.obtained from biopsies) to detect abnormal gene expression in patients with lymphedema or another lymph-associated disease. In addition, a polynucleotide comprising a sequence encoding any of the amino acid sequences set forth in SEQ ID NOS: 31-44, 46, 48 or 50 is useful for the diagnosis of conditions or diseases associated with aberrant expression of a polypeptide having any one of those amino acid sequences. Fragments comprising at least 10 nucleotides are also useful in these diagnostic methods.

[0222] Expression profiles may be generated using the compositions of the invention comprising SEQ ID NOs: 1-30, 45, 47, 49 and 51. The expression profile generated from the microarray is used to detect changes in the expression of genes implicated in disease.

### Example 8

### Transcription Factors in BECs and LECs

[0223] Transcription factors preferentially expressed in the LECs included the zinc finger factor c-maf and the MADS-family transcription factor MEF2C (FIG. 1). Targeted mutagenesis of MEF2C leads to embryonic death at E9.5-10 due to defects in the remodeling of the primary vasculature and abnormal endocardiogenesis (Bi, et al., Dev. Biol. 211:255-267. 1999). MEF2C has been reported to bind the transcription factor Sox18 and to potentiate its activity in endothelial cells (Hosking, et al., Biochem. Biophys. Res. Commun. 287:493-500. 2001). Mouse pups with a homozygous mutation in Sox18 that disrupts the MEF2C complex develop chylous ascites in some genetic backgrounds (Pennisi, D., et al., Nat. Genet. 24:434-437. 2000), suggesting that both proteins may be involved in the regulation of lymphatic development. In line with this hypothesis, RT-PCR analysis of MEF2C^{-/-} embryos showed decreased VEGFR-3 expression (Bi, et al., Dev. Biol. supra).

[0224] The STAT6 transcription factor, which is activated in response to IL-4, was expressed specifically in the BECs. Consistent with this observation, the results herein show that the IL-4 receptor was expressed preferentially in BECs, as were some of the IL-4 target chemokines and receptors such as MCP-1 and CXCR4. VEGF stimulation and activation of VEGFR-2 is also known to lead to STAT6 phosphorylation and activation in endothelial cells (Bartoli, et al., J. Biol. Chem. 275:33189-33192. 2000). The absence of STAT6 in LECs, therefore, suggests that the downstream signaling pathways of VEGFR-2 differ in BECs and LECs. Expression patterns of other transcription factors are shown in Table 5.

### Example 9

### Sox18 and Hereditary Lymphedema

[0225] Expression of the transcription factor MEF2C is upregulated in LECs. Sox18 (SEQ ID NO: 53, and encoding SOX18, SEQ ID NO: 54), which was reported to interact with MEF2C in mice, was also shown to play a potential role in lymphatic endothelial cell development. To investigate the role of Sox18 in human lymphedema, the correlation of human Sox18 mutants with human hereditary lymphedema was investigated.

[0226] The SOX proteins, homologs of the family of SRY transcription factors, are ubiquitous transcription factors which contain a putative high-mobility-group (HMG) DNA binding domain. (Wegner, M., Nucl. Acids Res. 27:1409-20. 1999). SOX proteins bind their DNA targets at a heptameric SOX consensus binding sequence [5′-(A/T)(A/T)CAA(A/T)G-3′] (Pennisi et al., Mol. Cell Bio. 20:9331-36. 2000) and generally bind DNA in the minor groove rather than the major groove of the double helix, which results in transcriptional regulation of the target gene. SOX proteins may also be involved in recruiting other DNA binding proteins to a DNA-protein complex, thereby assisting in transcription regulation (Wegner, supra). SOX18 shares homology with both SOX7 and SOX17, all members of the Group F Sox genes.

[0227] SOX18 is involved in vascular development and has been localized to the developing cardiovascular system and sites of angiogenic activity. Mice homozygous for the Ragged (Ra) mutation in Sox18 exhibit chylous ascites and edema (Pennisi et al., Nat. Genet. 24:434-37. 2000), similar to the Chy mouse model of lymphedema (Lyon et al., Mouse News Lett. 71: 26. 1984). The mutation in Ra mice has been determined to be a frameshift mutation that causes truncation of the transactivating domain (Pennisi et al., Nat. Genet. 24:434-37. 2000). Sox18 null mice, however, demonstrate only a slight phenotypic change in hair follicle development and show no signs of edema or irregular vascular development (Downes and Koopman, Trends Cardio. Med. 11:318-24. 2001). This phenotype may be due to redundancy among the Group F Sox members, SOX7 and SOX17. These proteins may substitute for SOX18 function in its absence, but cannot overcome a Sox18 dominant negative mutant such as the Ra mutations. Hence, knocking out the entire Group F family may produce a lymphedema phenotype similar to the Ragged mice.

[0228] Mouse and human SOX18 are homologous proteins containing a DNA binding HMG-box of approximately 80 amino acids (97% homologous), a transactivating domain which in mouse is about 93 amino acids (90% homologous), and a C-terminal domain (92% homologous) (Downes and Koopman, supra). The human SOX18 HMG-box has been localized to nucleotides 395-598, corresponding to amino acids 84-151. The mouse HMG-box is encoded by nucleotides 320-532, corresponding to amino acids 78-148. The human transactivation domain has not been delineated to date, but one of skill in the art could readily obtain the human transactivating domain using the -homologous mouse sequence, which is found at amino acids 252-346 of mouse SOX18 (Hosking et al., Gene 262:239-47. 2001). Although the human SOX18 protein exhibits similarities to mouse SOX18 at the primary structural level, there is no known association of a human Sox18 mutant with a disease or condition, such as hereditary lymphedema.

[0229] Human Sox18 has been mapped to chromosome 20q.13.3 (Stanojcic et al., Biochem. Biophys. Acta. 1492:237-41. 2000). Elucidation of an inheritable mutation at or near this chromosomal location that correlates with hereditary lymphedema is useful in confirming the genetic basis of the disease, in the screening of patients affected by hereditary lymphedema, in the screening of patients for a pre-disposition to develop hereditary or other forms of lymphedema, and also as a basis for target treatment regimens directed to overcoming the inherited mutation.

[0230] To determine the linkage of Sox18 with lymphedema, families with inherited lymphedema are identified for the purpose of conducting linkage and positional candidate gene analyses. Family members are considered affected with hereditary lymphedema if they exhibit asymmetry or obvious swelling of one or both legs or if they have received a medical diagnosis of lymphedema or if there are personal or family reports of extremity swelling or asymmetry.

[0231] Biological samples are obtained from members of the families to conduct the genetic analyses. DNA is isolated from EDTA-anticoagulated whole blood by the method of Miller et al., (Nucleic Acids Res. 16:1215. 1998), and from cytobrush specimens using the Puregene DNA isolation kit (Gentra Systems, Minneapolis, Minn.). Analysis of the markers used in the genome scan are performed by methods recognized in the art. See Browman et al., Am. J. Hum. Genetic., 63:861-869 (1998); see also the NHLBI Mammalian Genotyping Service.

[0232] To explore the potential role of Sox18 in lymphedema, probands from the lymphedema families are screened for variation by direct sequencing of portions of the Sox18 gene. The sequencing strategy uses amplification primers generated based upon the Sox18 cDNA sequence (SEQ ID NO: 53) and information on the genomic organization (intron-exon data, identified domain motifs) of the related Sox genes. Variable positions (single nucleotide polymorphisms) and unique sequence primers are used to amplify sequences flanking each variable site located in the domains used for analysis.

[0233] The Sox18 genomic DNA from both the normal and lymphedema affected individuals is sequenced and a map of mutations detected in the Sox18 gene of lymphedema patients as compared to unaffected individuals is generated. Commonly detected mutations in lymphedema patients, such as a conservative or non-conservative nucleotide change, a deletion, or an insertion, indicates that a mutation in that particular nucleotide confers a pre-disposition to developing lymphedema. Analysis of the genomic DNA of the affected individuals will correlate mutations in the Sox18 genomic sequence and lymphedema.

[0234] To confirm the correlation of Sox18 mutations and the development of lymphedema, genetic linkage studies are performed, as set out in the method of identifying genetic polymorphisms described in U.S. patent application number US2003026759 and PCT/US99/06133, each of which is incorporated herein by reference.

[0235] Two-point linkage analysis is conducted using an autosomal dominant model predicting 80% penetrance in the heterozygous state, 99% penetrance in the homozygous state, and a 1% phenocopy rate. The frequency of the disease allele is set at 1/10,000. Microsatellite marker allele frequencies are calculated by counting founder alleles, with the addition of counts of non-transmitted alleles. Multipoint analysis is carried out using distances from the Location Database provided by the University of Southampton School of Medicine. Multipoint and 2-point analyses are facilitated using the VITESSE (v1.1) program. (O'Connell, and Weeks, Nature Genet., 11:402-408. 1995).

[0236] Analysis of the markers used in the genome scan are performed by methods recognized in the art. [See Browman et al., Am. J. Hum. Genetic., 63:861-869 (1998); see also the NHLBI Mammalian Genotyping Service and databases offered by the Center for Molecular Genetics (Marshfield, Wis.). One of skill in the art readily chooses genetic linkage markers identified in chromosome 20 (specifically 20q13.3), where Sox18 has been localized (Stanojcic et al., supra).

[0237] Linkage simulation is performed using SLINK (Weeks et al., Am. J. Hum. Genet. 47:A204. 1990) and linkage is analyzed using MSIM (Ott, J., Proc. Nat. Acad. Sci. USA, 86:4175-4178. 1989) to estimate the potential power of two point linkage analysis in the family being assessed. Marker genotypes are simulated for a marker with heterozygosity of 0.875 under a linked (θ=0) and unlinked (θ=0.5) model using the available individuals. The simulation is set such that the power to detect linkage is greater than 90% for a LOD score threshold of Z(θ) 2.0 and the false positive rate is less than 5%.

[0238] Mutations that correlate strongly with a heritable lymphedema are expected to be mutations in functional domains of the SOX18 protein, e.g., the HMG-Box domain or the transactivating domain. Exemplary mutations include missense mutations that cause non-conservative substitutions, nucleotide deletions or insertions that cause frameshifts in the Sox18 coding region, in-frame deletions or insertions such as those affecting a functional domain(s), or alterations of control regions affecting the level of Sox18 expression.

[0239] Upon identification of the Sox18 lymphedema-correlated mutations, Sox18 mutant expression vectors containing an isolated mutant Sox18 allele is expressed in, e.g., 293T or endothelial cells. The Sox18 mutant DNA can also be integrated into a plasmid useful in the mammalian two-hybrid system, such as pGAL4, to measure SOX18 interaction with its binding partners, such as MEF2C (Hosking et al., Biochem. Biophys. Res. Comm. 287: 493-500. 2001) or to screen for SOX18 binding partners. For example, pGAL4Sox18 vector links the Sox18 gene to the yeast Gal4 DNA binding domain and a transcriptional activator is linked to a SOX18 binding partner in a separate vector. Co-introduction of these vectors into a host cell will result in detectable reporter gene expression resulting from SOX18 interactions with the binding partner or candidate binding partner. The pCMV-BD and pCMV-AD vectors, which contain a GALA DNA binding domain and the NF-κB transcriptional domain, respectively, are useful in this assay (BD Biosciences Clontech) for constructing and expressing gene fusions, with SOX18 binding activity detected using the luciferase reporter system.

[0240] In such a di-hybrid assay, a Sox18 lymphedema-correlated mutant that contains a mutation affecting SOX18 binding via the transactivating domain will decrease the amount of luciferase reporter activity, indicating that the Sox18 lymphedema-correlated mutation may result in lymphedema through a defect in its ability to bind its binding partner through its transactivating domain.

[0241] A Sox18 allele is also assessed for a mutation in its HMG-box DNA binding domain through several techniques. DNA binding is assessed in a one-hybrid assay in which the DNA sequence bound by SOX18, e.g. 5′-(A/T)(A/T)CAA(A/T)G-3′ and permutations thereof, is placed in front of (i.e., upstream of or 5′ to) a promoter/reporter gene construct similar to the target plasmid in a two-hybrid assay. The reporter assay then detects binding between a SOX18 protein and its putative DNA binding sequence. DNA binding is also assessed using a gel shift assay performed by incubating a purified SOX18 protein with a ³²P end-labeled DNA fragment containing the SOX18 DNA-binding sequence. The reaction products are then analyzed on a non-denaturing polyacrylamide gel to measure the mobility of DNA-bound or free SOX18. The specificity of a SOX18 polypeptide for the putative binding site is established by competition experiments using DNA fragments or oligonucleotides containing a binding site for SOX18 or other unrelated DNA sequences.

[0242] Additionally, fluorescence-based assays for detection of DNA/protein binding are used. SOX18 DNA binding is detected by fluorescence measurement of single fluorophores which are bound to either the DNA or protein. In these assays, protein binding is determined by a change in fluorescence intensity or polarization when DNA-protein complexes form. Alternatively, two DNA fragments, each containing half of the protein binding site, are generated. The two double-stranded DNA fragments have complementary single-strand overhangs that comprise part of the protein binding site. One DNA fragment is labeled with a fluorescence donor while the other is labeled with an acceptor, with fluorescence detected only upon fluorescence resonance energy transfer (FRET). Upon protein binding, the overhangs of the two DNA fragments anneal and bring the fluorescence donor and acceptor into proximity, resulting in transfer of the fluorescence energy, which results in detectable fluorescence of the acceptor. See Heyduk, et al., Nat. Biotechnol. 20:171-6. 2002.

[0243] Correlation of a mutation in the human Sox18 genome with the risk of developing lymphedema provides another method for diagnosis and/or treatment of individuals affected by hereditary lymphedema. Elucidation of a Sox18 mutation associated with lymphedema allows for the determination of the SOX18 protein activity is disturbed by the mutation, e.g., DNA binding or protein binding, and provides direction for treatment of patients with lymphedema.

[0244] Additionally contemplated is the treatment of patients with Sox18-induced lymphedema with a lymphatic growth factor such as VEGF-C and/or VEGF-D to overcome impaired lymphatic vascular development. For example, treatment of VEGFR-3 defective animals with VEGF-C and/or VEGF-D overcomes the inability of VEGFR-3 to signal, thereby promoting lymphangiogenesis and ameliorating symptoms of lymphedema. Sox18-induced lymphedema patients are treated with a therapeutically effective amount of VEGF-C and/or VEGF-D. In an additional embodiment, VEGF-C and/or VEGF-D are administered to the above patients in conjunction with other therapies designed to relieve the symptoms of lymphedema.

### Example 10

[0245] VEGF-C and VEGF-D knockout mice demonstrate aberrant vascular development which can be overcome by administration of exogenous VEGF-C and/or VEGF-D polypeptide. To determine if Sox18 transcriptional regulation can overcome this defect due to its potential interaction with, and transcriptional effect on, the VEGFR-3 promoter, VEGF-C or VEGF-D knockout mice are genetically crossed by interbreeding with mice overexpressing Sox18 from a cell-specific-promoter (e.g. K-14 keratin promoter) or a retroviral vector. The effects of Sox18 activity on lymphedema are assessed through measurement of lymphedema and vascular development, as described in Example 10.

[0246] Survival of the knockout mice and detection of lymphatic development in the VEGF-C and/or VEGF-D knockout/Sox18-overexpressing mice indicates that Sox18 induces VEGFR-3 signaling and plays a key role in lymphangiogenesis.

[0247] VEGF-C overexpressing mice (K-14-VEGF-C Tg) exhibit an extensive network of lymphatic vasculature, are prone to tumor metastasis, and demonstrate upregulated VEGFR-3 expression and symptoms of lymphedema (U.S. Pat. No. 6,361,946). To determine if Sox18 regulates VEGF-C signaling through VEGFR-3, K-14-VEGF-C Tg mice are crossed to animals which express a naturally mutated Sox18 (Ragged mutation) or a laboratory-designed mutant constructed using site-directed mutagenesis and standard knockout techniques known in the art to generate a mutation in either the DNA-binding or transactivating domain of the SOX protein, resulting in a K-14-VEGF-C Tg/Sox18^{-/-} mouse.

[0248] Decreased lymphangiogenesis, decreased incidence of tumor metastasis, and decreased levels of VEGFR-3 exhibited by the K-14-VEGF-C TgSox18^{-/-} double mutant animals as compared to the K-14-VEGF-C Tg single mutant animal indicates that the Sox18 molecule interferes with VEGF-C signaling through VEGFR-3 and that inhibition of the VEGFR-3 signaling in the Sox18 mutant downregulates the lymphangiogenic effects of activated VEGFR-3.

[0249] Alternatively, K-14-VEGF-C Tg mice are crossed to mice transgenic for a Sox18 allele that is overexpressed (see above) and the effects of Sox18 upregulation are measured. A decrease in lymphangiogenesis, decreased incidence of tumor metastasis, and decreased levels of VEGFR-3 exhibited by the K-14-VEGF-C Tg/Sox18 overexpressing double mutant animals as compared to the K-14-VEGF-C Tg single mutation indicates that Sox18 transcriptional regulation inhibits VEGFR-3 signaling and is likely a factor in negatively regulating lymphangiogenesis.

[0250] A result indicating that Sox18 is a negative regulator of lymphangiogenesis provides a method of treating disorders mediated by extensive lymphatic vasculature, such as lymphangiogenesis in tumor development or lymphangiosarcoma, by administration of a vector providing the SOX18 transcription factor in excess thereby preventing the induction of lymphangiogenic signals.

### Example 11

### Sox18 in Lymphatic Development

[0251] Lymphatic endothelial cells show a unique development pattern that is highly regulated by several LEC-specific genes such as VEGFR-3 and Prox-1. Sox18, as a DNA binding protein and transcription factor, is expected to be involved in the regulation of these LEC-specific genes, contributing to the elaboration of a LEC cellular fate. Several lines of evidence indicate that Sox18 may be involved in VEGFR-3 transcription regulation: SOX18 binds to the transcription factor MEF2C in mice, both Sox18-mutant and MEF2C-deficient mice exhibit lymphedema symptoms similar to VEGFR-3 mutant mice, and the VEGFR-3 promoter contains a MEF2C binding site (Iljin et al, FASEB J. 15:1028-36. 2001). These observations support a role for SOX18 in lymphatic development.

[0252] To analyze the ability of Sox18 to affect the transcription of LEC-specific growth factors, blood vascular endothelial cells are induced to develop into LECs by the addition of an AdProx-1 vector. Sox18 mRNA and protein levels are measured before and after the addition of the Prox-1 vector. Upregulation of Sox18 after the addition of the Prox-1 vector is expected to correlate with the development of lymphatic endothelial cells, indicating that Sox18 is a factor in. LEC differentiation. Alternatively, either the DNA binding or transactivation activity of Sox18 is disrupted via site-directed mutagenesis, thereby resulting in either a dominant negative or inactive SOX18 protein. The plasmid containing the Sox18-disrupted allele is co-transfected into BECs with the AdProx-1 vector to assess LEC development in the presence of a dysfunctional Sox18 gene. Detection of LEC-specific markers such as LYVE-1 and podoplanin are also used in these experiments to measure the ability of Sox18 to modulate lymphatic development. Additionally, mutant Sox18 is also co-transfected with vectors encoding LEC-specific proteins (e.g., VEGFR-3, Prox-1, LYVE-1) into 293T cells and the ability of the mutated Sox18 to regulate the activities of those genes is assessed. For example, signaling in VEGFR-3 co-transfected 293T cells stimulated with VEGF-C in the presence and absence of Sox18 is assessed using a phosphorylation assay.

[0253] Development of the lymphatic vasculature can also be evaluated in Sox18 mutant mice, including Ra mice, Sox18 null mice, and Sox18 mice transgenic for a mutation described herein that correlates with a pre-disposition to lymphedema. Transgenic Sox18 mice exhibiting a symptom of lymphedema are engineered to express a mutation in the mouse gene homologous to the human mutation or are engineered to express the human Sox18 gene containing a lymphedema-specific mutation. Development of the vasculature in these animals is analyzed, as set out in U.S. Pat. No. 6,361,946 (see also Kaipainen et al., Proc. Natl. Acad. Sci. (USA), 92:3566-70. 1995), using techniques known in the art, such as in situ hybridization, to detect VEGF-C and/or VEGFR-3 mRNA expression, antibody detection of VEGF-C and/or VEGFR-3 proteins in vivo, and Evan's blue dye detection to determine the extent of LEC development and to visualize effective lymph drainage in vivo.

[0254] An increase in VEGFR-3 signaling in a dominant negative Sox18 mutant transfectant indicates that Sox18 expression has a detrimental effect on VEGFR-3-mediated activity. The invention contemplates a therapy to overcome this type of mutation comprising administering to mammal, such as a human patient, a composition comprising a SOX18 inhibitor, such as a dominant negative gene or dominant negative Sox18 ligand which interferes with the ability of SOX18 to interfere with VEGFR-3 signaling. Alternatively, if Sox18 activation promotes VEGFR-3 activity this provides an indication that a therapy for lymphedema comprises a composition which promotes SOX18 transcriptional activity, such as cells given ex-vivo which overexpress Sox18.

### Example 12

### Sox18 Directed Therapy in Lymphedema

[0255] Another aspect of the invention is the use of Sox18 to produce cell-based therapeutic compositions, particularly LEC cell-based compositions. In one embodiment, the cells are autologous cells, i.e., cells of the organism (e.g., human patient) receiving treatment for a disease or disorder of the lymphatic system. The invention contemplates elevating the endogenous expression of Sox18, for example by the modification of expression control regions, e.g., promoters, through recombinant techniques such as homologous recombination. Alternatively, the cells are transformed or transfected with an isolated Sox18, e.g., a heterologous Sox18, for heterologous Sox18 expression, either in vivo or ex vivo.

[0256] For example, SOX18 interacts with transcription factor MEF2C, with the complex binding to the VEGFR-3 promoter, thereby inducing VEGFR-3 transcription and affecting VEGFR-3 protein expression and signaling levels. It is contemplated that insertion of a Sox18 gene driven by a retroviral or adenoviral vector into an LEC expressing VEGFR-3 will upregulate VEGFR-3-mediated signaling.

[0257] These Sox18-expressing cells are then used as a therapeutic composition in the treatment of patients with an LEC disease or disorder, such as hereditary lymphedema or trauma-induced lymphedema These cells are used to treat any disease or condition associated with a decrease in expression of VEGFR-3, such as lymphangioma, lymphangiomyeloma, lymphangiomatosis, lymphangiectasis, lymphosarcoma, and lymphangiosclerosis.

[0258] Additionally, a SOX18 polypeptide or polypeptide fragment is administered to a patient experiencing lymphedema to relieve the symptoms of lymphedema. It is contemplated that administration of either a full-length SOX18 polypeptide or a fragment of SOX18, which contains either the DNA binding domain or the transactivating domain, will bind to its cognate binding partner in vivo and promote VEGFR-3 signaling, or will initiate downstream events in the lymphangiogenic process, thus bypassing a defect in VEGFR-3 signaling or VEGF-C ligand binding involved in lymphedema.

[0259] In a related aspect, if SOX18 expression inhibits VEGFR-3 signaling via decreased transcription factor binding or DNA binding, it is expected that inhibition of SOX18 will result in a compensatory upregulation of VEGFR-3, ameliorating deleterious symptoms associated with VEGFR-3 under-expression. Administration of antisense therapy specific for the Sox 18 gene in instances where Sox 18 negatively regulates VEGFR-3 activity will inhibit SOX18 activity thereby allowing VEGFR-3-mediated signaling and lymphatic growth. Due to the potential functional redundancy of the Group F SOX proteins (SOX7/17/18), however, it may be necessary to inactivate all three proteins through a mechanism that inhibits the DNA binding activity of all Group F proteins. This is done, e.g., by targeting the DNA binding domain, which is highly homologous among all the proteins. It is contemplated that recombinant SOX7/17/18 proteins expressing a mutated DNA binding domain, when administered as a pharmaceutical composition (containing all three mutant peptides), will inhibit SOX18 downregulation of VEGFR-3 and induce or promote VEGFR-3 signaling activity. From the foregoing it will be appreciated that, although specific embodiments of the invention have been described herein for purposes of illustration, various modifications may be made without deviating from the spirit and scope of the invention.

[0260] All of the above U.S. patents, U.S. patent application publications, U.S. patent applications, foreign patents, foreign patent applications and non-patent publications referred to in this specification and/or listed in the [Application Data Sheet] are incorporated herein by reference, in their entirety.

TABLE 3
Lymphatic EC (187 genes)

| | | | | | | Gene expression | | | | |
|---|---|---|---|---|---|---|---|---|---|---|
| | | | | | | analysis | | Confirmed | | |
| | accession | | Affymetrix | Detection¹ | | signal log | | by: | | signal log |
| | numbers | | ID | BEC | LEC | ratio² | s.d.³ | NB | IF | ratio |
| lung type-I cell membrane-associated | AF030428 | NM_006474 | 41870_at | A | P | 7.4 | 0.925 | | + | |
| protein, podoplanin | | | | | | | | | | |
| lung type-I cell membrane-associated | AI660929 | NM_006474 | 41871_at | A | P | 6.1 | 0.150 | | + | |
| protein, podoplanin | | | | | | | | | | |
| cellular retinol-binding protein | M11433 | NM_002899 | 38634_at | A | P | 7.3 | 0.255 | | | |
| macrophage mannose receptor | M93221 | | 36908_at | A | P | 7.1 | 0.682 | | | |
| (MRC1) | | | | | | | | | | |
| transcription factor C-MAF | AF055376 | NM_005360 | 41504_s_at | P | P | 5.1 | 0.522 | | | |
| transcription factor C-MAF | AF055376 | NM_005360 | 41505_r_at | A | P | 3.9 | 0.588 | | | |
| selenoprotein P | Z11793 | NM_005410 | 34363_at | A | P | 5.0 | 0.331 | | | |
| KIAA0466, immunoglobulin | AB007935 | NM_001542 | 38086_at | A | P | 4.9 | 2.028 | | | |
| superfamily, member 3 | | | | | | | | | | |
| type II membrane protein similar to | AB015629 | NM_014257 | 39270_at | A | P | 4.9 | 0.846 | | | |
| HIV gp120-binding C-type lectin, | | | | | | | | | | |
| CD209 antigen-like | | | | | | | | | | |
| KIAA0626 | AB014526 | NM_021647 | 33241_at | A | P | 4.7 | 0.212 | | | |
| KIAA0711 | AB018254 | NM_014867 | 36453_at | A | P | 4.6 | 0.055 | + | | |
| integrin alpha 9 | D25303 | NM_002207 | 1508_at | A | P | 4.3 | 0.712 | + | + | |
| integrin alpha 9 | D25303 | NM_002207 | 35948_at | A | P | 3.6 | 1.086 | + | + | |
| relaxin H2 | X00948 | NM_005059 | 31732_at | A | P | 4.1 | 0.432 | | | |
| KIAA0644 | AB014544 | NM_014817 | 34214_at | A | P | 3.9 | 0.803 | + | | |
| Cdk-inhibitor p57KIP2 (KIP2) | U22398 | NM_000076 | 1787_at | A | P | 3.8 | 2.020 | + | | 3.3 |
| Cdk-inhibitor p57KIP2 (KIP2) | U22398 | NM_000076 | 39545_at | A | P | 3.0 | 0.150 | + | | 1.4 |
| transient receptor potential channel | AJ006276 | NM_004621 | 36365_at | A | P | 3.8 | 0.988 | | | |
| TRPC6 | | | | | | | | | | |
| cDNA DKFZp564O222 (from clone | AL050002 | | 38312_at | A | P | 3.6 | 0.876 | | | |
| DKFZp564O222) | | | | | | | | | | |
| subtilisin-like protein (PACE4), | M80482 | NM_002570 | 32001_s_at | P | P | 3.6 | 0.334 | | | |
| paired basic amino acid cleaving | | | | | | | | | | |
| system 4 | | | | | | | | | | |
| regulator of G-protein signalling 16, | U70426 | NM_002928 | 41779_at | A | P | 3.6 | 0.673 | | | |
| A28-RGS14p | | | | | | | | | | |
| dihydropyrimidinase related protein- | D78012 | NM_001313 | 40272_at | A | P | 3.5 | 1.192 | | | |
| 1, collapsin response mediator | | | | | | | | | | |
| protein 1 | | | | | | | | | | |
| desmoplakin (DPI, DPII) | AL031058 | NM_004415 | 36133_at | A | P | 3.5 | 0.426 | | + | 1.0 |
| pendrin, solute carrier family, | AF030880 | NM_000441 | 36376_at | A | P | 3.3 | 1.156 | | | |
| member 4 | | | | | | | | | | |
| reelin (RELN) | U79716 | NM_005045 | 37530_s_at | P | P | 3.3 | 0.142 | | | |
| integrin, alpha 1 | X68742 | | 120_at | P | P | 3.3 | 0.080 | + | | |
| integrin alpha 1 | X68742 | | 37484_at | M | P | 2.4 | 0.345 | + | | |
| cholesterol 25-hydroxylase | AF059214 | NM_003956 | 32363_at | A | P | 3.3 | 0.137 | | | 1.5 |
| inhibin beta-B-subunit precursor | M31682 | NM_002193 | 38545_at | P | P | 3.2 | 0.056 | | | 3.0 |
| KIAA1233 | AL109724 | | 38856_at | A | P | 3.1 | 1.540 | | | |
| pre-B cell stimulating factor | L36033 | NM_000609 | 33834_at | A | P | 3.0 | 0.860 | RT- | | |
| homologue (SDF1b) | | | | | | | | PCR | | |
| V-Erba Related Ear-3 Protein | HG3510-HT3704 | | 1147_at | P | P | 2.9 | 0.398 | | | 1.7 |
| antigen identified by monoclonal | X05323 | | 37716_at | P | P | 2.9 | 0.283 | + | | 1.0 |
| antibody MRC OX-2 | | | | | | | | | | |
| apolipoprotein D | J02611 | NM_001647 | 36681_at | M | P | 2.9 | 0.150 | + | | |
| TIMP3, tissue inhibitor of matrix | U14394 | NM_000362 | 1035_g_at | A | P | 2.8 | 0.528 | + | | |
| metalloproteinases | | | | | | | | | | |
| TIMP3 | U14394 | NM_000362 | 1034_at | P | P | 1.9 | 0.224 | + | | |
| aldehyde dehydrogenase 1 | K03000 | NM_000689 | 37015_at | P | P | 2.8 | 0.275 | | | |
| prospero-related homeobox 1 (prox | U44060 | NM_002763 | 31918_at | A | P | 2.8 | 0.299 | + | + | (5, 6) |
| 1) | | | | | | | | | | |
| matrix Gla protein | AI953789 | NM_000900 | 36683_at | A | P | 2.6 | 0.250 | + | | |
| neuronal pentraxin II (NPTX2) | U29195 | | 35663_at | A | P | 2.6 | 1.267 | | | 2.9 |
| histatin 2 (HIS2) | M26665 | NM_000200 | 41148_at | A | P | 2.6 | 1.009 | | | |
| ADDL mRNA for adducin-like | D67031 | NM_016824 | 33102_at | P | P | 2.6 | 0.277 | + | | |
| protein, adducin 3 (gamma) | | | | | | | | | | |
| adducin 3 (gamma) | U37122 | NM_016824 | 33103_s_at | M | P | 2.4 | 0.397 | + | | |
| MADS box transcription enhancer | L08895 | NM_002397 | 37710_at | A | P | 2.5 | 0.540 | + | | |
| factor 2, polypeptide C (myocyte | | | | | | | | | | |
| enhancer factor 2C) | | | | | | | | | | |
| MADS box transcription enhancer | | NM_002397 | 37712_g_at | A | P | 1.9 | 0.197 | + | | |
| factor 2, (myocyte enhancer factor | | | | | | | | | | |
| 2C) | | | | | | | | | | |
| MADS box transcription enhancer | S57212 | NM_002397 | 37711_at | A | P | 1.4 | 0.442 | + | | |
| factor 2, polypeptide C (myocyte | | | | | | | | | | |
| enhancer factor 2C) | | | | | | | | | | |
| phosphoglucomutase 5 | L40933 | NM_021965 | 33694_at | A | P | 2.5 | 0.431 | | | |
| cyclin E2 | AF102778 | NM_004702 | 35249_at | A | P | 2.5 | 0.906 | | | 5.8 |
| interleukin 7 (IL7) | M29053 | | 33966_at | A | P | 2.4 | 0.191 | | | |
| interleukin 7 | J04156 | NM_000880 | 1159_at | A | P | 1.9 | 0.921 | | | |
| cDNA DKFZp586L0120 (from clone | AL050154 | | 38351_at | P | P | 2.4 | 0.135 | | | |
| DKFZp586L0120) | | | | | | | | | | |
| peroxisome proliferative activated | L40904 | NM_005037 | 37104_at | A | P | 2.4 | 0.502 | | | |
| receptor, gamma, PPARG | | | | | | | | | | |
| fatty acid binding protein 4 | AA128249 | NM_001442 | 38430_at | P | P | 2.4 | 0.132 | | | |
| protein kinase C zeta | Z15108 | NM_002744 | 362_at | P | P | 2.4 | 0.008 | | | |
| 46 kDa coxsackievirus and | Y07593 | NM_001338 | 37534_at | P | P | 2.3 | 0.137 | | | 2.2 |
| adenovirus receptor (CAR) protein | | | | | | | | | | |
| PAC clone RP4-751H13 from 7q35-qter, | AC004877 | | 39837_s_at | A | P | 2.3 | 0.714 | | | |
| zinc finger-like | | | | | | | | | | |
| thymidine kinase 1, soluble | M15205 | NM_003258 | 910_at | P | P | 2.3 | 0.205 | | | 2.1 |
| thymidine kinase 1 | K02581 | NM_003258 | 41400_at | M | P | 1.7 | 0.193 | | | 1.4 |
| Pig7 (PIG7), LPS-induced TNF-alpha | AF010312 | NM_004862 | 37024_at | A | P | 2.3 | 0.233 | | | 4.6 |
| factor | | | | | | | | | | |
| LPS-induced TNF-alpha factor | AL120815 | NM_004862 | 37025_at | P | P | 1.3 | 0.327 | | | 3.8 |
| lipase A, lysosomal acid, cholesterol | X76488 | NM_000235 | 38745_at | P | P | 2.3 | 0.281 | | | |
| esterase | | | | | | | | | | |
| ubiquitin specific protease 13 | U75362 | NM_003940 | 40701_at | A | P | 2.2 | 0.334 | | | |
| (isopeptidase T-3) | | | | | | | | | | |
| carcinoembryonic antigen-related cell | X16354 | NM_001712 | 988_at | P | P | 2.2 | 0.048 | | | |
| adhesion molecule 1 (biliary | | | | | | | | | | |
| glycoprotein) CEACAM1 | | | | | | | | | | |
| cDNA DKFZp586D0918 (from clone | AL049370 | | 41856_at | P | P | 2.1 | 0.385 | | | |
| DKFZp586D0918) | | | | | | | | | | |
| KIAA0598, B cell RAG associated | AB011170 | NM_014863 | 35350_at | P | P | 2.1 | 0.154 | | | |
| protein | | | | | | | | | | |
| RAMP2 (receptor (calcitonin) | AJ001015 | NM_005854 | 38177_at | P | P | 2.1 | 0.361 | | | |
| activity modifying protein 2) | | | | | | | | | | |
| cholesteryl ester transfer protein | M30185 | NM_000078 | 40741_at | A | P | 2.1 | 0.191 | | | |
| precursor | | | | | | | | | | |
| epithelial membrane protein 2 | U52100 | NM_001424 | 39631_at | P | P | 2.0 | 0.141 | | | 1.0 |
| MHC class II lymphocyte antigen | M83664 | NM_002121 | 38095_i_at | A | P | 2.0 | 1.368 | | | |
| (HLA-DP) beta chain | | | | | | | | | | |
| MHC class II lymphocyte antigen | M83664 | NM_002121 | 38096_f_at | A | P | 1.2 | 0.034 | | | |
| (HLA-DP) beta chain | | | | | | | | | | |
| beta-arrestin 2 | AF106941 | NM_004313 | 33283_at | A | P | 2.0 | 0.273 | | | |
| mitotic checkpoint kinase Bub1 | AF053305 | NM_004336 | 41081_at | A | p | 2.0 | 0.195 | | | |
| (BUB1) | | | | | | | | | | |
| KIAA0229, similar to human ankyrin | D86982 | | 40971_at | P | P | 2.0 | 0.195 | | | 1.6 |
| 1(S08275) | | | | | | | | | | |
| Sprouty 1 homolog (antagonist of | AF041037 | | 38767_at | P | P | 2.0 | 0.209 | | | |
| FGF signaling) | | | | | | | | | | |
| guanine nucleotide exchange factor | | NM_012294 | 38062_at | P | P | 2.0 | 0.497 | | | 2.1 |
| for Rap1; M-Ras-regulated GEF, | | | | | | | | | | |
| KIAA0277 | | | | | | | | | | |
| translin | X78627 | NM_004622 | 36177_at | A | P | 2.0 | 0.140 | | | |
| erythrocyte membrane protein band | U28389 | NM_0019178 | 37192_at | P | P | 2.0 | 0.265 | | | 1.9 |
| 4.9 (dematin) | | | | | | | | | | |
| KIAA0846 protein | AB020653 | NM_015376 | 34748_at | A | P | 2.0 | 0.457 | | | |
| glia maturation factor, gamma | W07033 | NM_004877 | 35261_at | P | P | 1.9 | 0.083 | | | 1.0 |
| insulin-like growth factor binding | X16302 | NM_000597 | 40422_at | A | P | 1.9 | 1.157 | | | |
| protein 2 (IGFBP-2) | | | | | | | | | | |
| smooth muscle myosin heavy chain | S67247 | | 32838_at | A | P | 1.9 | 0.179 | | | |
| isoform Smemb | | | | | | | | | | |
| TTG-2 (cysteine rich protein with | X61118 | NM_005574 | 32184_at | P | P | 1.9 | 0.221 | 1.0 | | |
| LIM motif), LIM domain only 2 | | | | | | | | | | |
| (rhombotin-like 1) | | | | | | | | | | |
| cyclin B2 | AL080146 | NM_004701 | 32263_at | A | P | 1.9 | 0.276 | | | |
| KIAA0353 | AB002351 | | 39544_at | P | P | 1.9 | 0.158 | | | 1.8 |
| KIAA0559, piccolo (presynaptic | AB011131 | | 37780_at | A | P | 1.9 | 0.330 | | | |
| cytomatrix protein) | | | | | | | | | | |
| G protein-coupled receptor, family C, | AC00413 | NM_016235 | 40240_at | P | P | 1.9 | 0.047 | | | 2.1 |
| group 5, member B | | | | | | | | | | |
| G protein-coupled receptor, family C, | AI801872 | NM_016235 | 40239_g_at | P | P | 1.4 | 0.303 | | | |
| group 5, member B | | | | | | | | | | |
| CREM (cyclic AMP-responsive | S68134 | NM_001881 | 32066_g_at | P | P | 1.9 | 0.098 | | | 1.7 |
| element modulator beta isoform) | | | | | | | | | | |
| CREM (cyclic AMP-responsive | S68134 | NM_001881 | 32065_at | P | P | 1.8 | 0.241 | | | 2.0 |
| element modulator beta isoform) | | | | | | | | | | |
| CREM (cyclic AMP-responsive | S68271 | NM_001881 | 32067_at | P | P | 1.5 | 0.182 | | | 2.0 |
| element modulator beta isoform) | | | | | | | | | | |
| hypothetical protein FLJ13110 | AL080222 | NM_022912 | 36096_at | A | P | 1.9 | 0.387 | | | |
| inositol(myo)-1(or 4)- | AF014398 | NM_014214 | 36496_at | A | P | 1.8 | 0.590 | | | 3.2 |
| monophosphatase 2 | | | | | | | | | | |
| KIAA0937 protein | AB023154 | | 35369_at | P | P | 1.8 | 0.185 | | | |
| mitotic spindle coiled-coil related | AF063308 | NM_006461 | 32120_at | A | P | 1.8 | 0.257 | | | |
| protein | | | | | | | | | | |
| cysteine and glycine-rich protein 2 | U57646 | NM_001321 | 41401_at | A | P | 1.8 | 0.431 | | | 4.3 |
| (CSRP2) | | | | | | | | | | |
| topoisomerase (DNA) II alpha | AI375913 | NM_001067 | 40145_at | P | P | 1.8 | 0.239 | | | 1.0 |
| (170 kD) | | | | | | | | | | |
| DNA topoisomerase II | J04088 | NM_001067 | 1592_at | P | P | 1.2 | 0.162 | | | |
| protein phosphatase inhibitor 2 | U68111 | | 33180_at | P | P | 1.8 | 0.319 | | | |
| (PPP1R2) | | | | | | | | | | |
| KIAA0186 | D80008 | NM_021067 | 39677_at | A | P | 1.8 | 0.269 | | | 1.4 |
| dual-specificity tyrosine-(Y)- | Y12735 | NM_003582 | 39931_at | P | P | 1.8 | 0.146 | | | |
| phosphorylation regulated kinase 3 | | | | | | | | | | |
| (Dyrk3) | | | | | | | | | | |
| kinesin-like spindle protein HKSP | U37426 | NM_004523 | 40726_at | M | P | 1.8 | 0.439 | | | |
| (HKSP) | | | | | | | | | | |
| huntingtin-associated protein | U94190 | NM_003947 | 40655_at | P | P | 1.8 | 0.529 | | | 1.4 |
| interacting protein (duo) | | | | | | | | | | |
| diubiquitin | AL031983 | NM_006398 | 39959_at | A | P | 1.8 | 0.841 | | | |
| bikunin, serine protease inhibitor, | U78095 | NM_021102 | 34348_at | A | P | 1.8 | 0.398 | | | |
| Kunitz type, 2 | | | | | | | | | | |
| cytochrome P-450-1 (TCDD- | K03191 | NM_000499 | 36767_at | A | P | 1.7 | 0.165 | | | 2.0 |
| inducible) | | | | | | | | | | |
| cytochrome P(1)-450 | X02612 | NM_000499 | 1025_g_at | P | P | 1.1 | 0.125 | | | 1.7 |
| KIAA0513 | | NM_014732 | 38735_at | A | P | 1.7 | 0.297 | | | |
| protein phosphatase inhibitor 2 | U68111 | | 812_at | P | P | 1.7 | 0.185 | | | |
| (PPP1R2) | | | | | | | | | | |
| RAMP3 (receptor (calcitonin) | AJ001016 | NM_005856 | 35152_at | P | P | 1.7 | 0.228 | | | |
| activity modifying protein 3) | | | | | | | | | | |
| B-myb | X13293 | NM_002466 | 1854_at | M | P | 1.7 | 0.455 | | | 2.3 |
| KIAA0952 | AB023169 | NM_014962 | 37755_at | P | P | 1.7 | 0.254 | | | 1.0 |
| interferon stimulated gene (20 kD), | U88964 | NM_002201 | 33304_at | A | P | 1.7 | 0.178 | | | |
| HEM45 | | | | | | | | | | |
| GS3955 | D87119 | NM_021643 | 717_at | P | P | 1.7 | 0.107 | | | 1.6 |
| GS3955 | D87119 | NM_021643 | 40113_at | P | P | 1.3 | 0.098 | | | 1.3 |
| GRB2-related adaptor protein (Grap) | U52518 | NM_006613 | 805_at | A | P | 1.7 | 0.147 | | | |
| KIAA1071 protein | AB028994 | | 38286_at | A | P | 1.7 | 0.625 | | | |
| RNA-binding protein gene with | D84111 | NM_006867 | 34162_at | P | P | 1.7 | 0.347 | | | |
| multiple splicing, RBP-MS/type 5 | | | | | | | | | | |
| RNA-binding protein gene with | D84111 | NM_006867 | 34163_g_at | P | P | 1.6 | 0.147 | | | |
| multiple splicing, RBP-MS/type 5 | | | | | | | | | | |
| RBP-MS/type 4, RNA-binding protein | D84110 | NM_006867 | 1276_g_at | P | P | 1.5 | 0.263 | | | |
| gene with multiple splicing | | | | | | | | | | |
| RBP-MS/type 4, RNA-binding protein | D84110 | NM_006867 | 38049_g_at | P | P | 1.3 | 0.268 | | | |
| gene with multiple splicing | | | | | | | | | | |
| RBP-MS/type 3, RNA-binding protein | D84109 | NM_006867 | 38047_at | P | P | 1.2 | 0.225 | | | |
| gene with multiple splicing | | | | | | | | | | |
| alpha-actinin-2-associated LIM | AF002282 | NM_014476 | 39690_at | A | P | 1.7 | 0.728 | | | 1.5 |
| protein | | | | | | | | | | |
| semaphorin-III (Hsema-I), | L26081 | NM_006080 | 33461_at | A | P | 1.6 | 0.445 | | | |
| semaphorin 3A | | | | | | | | | | |
| IQ motif containing GTPase | U51903 | NM_006633 | 1647_at | M | P | 1.6 | 0.395 | | | |
| activating protein 2 | | | | | | | | | | |
| Arrestin, Beta 2 | HG2059-HT2114 | | 957_at | P | P | 1.6 | 0.342 | | | |
| retinoblastoma-associated protein | AF017790 | NM_006101 | 40041_at | P | P | 1.6 | 0.153 | | | 2.0 |
| HEC | | | | | | | | | | |
| LIM domain binding protein (LDB1) | AF052389 | NM_001290 | 36065_at | P | P | 1.6 | 0.153 | | | 1.9 |
| dual specificity phosphatase 5 | U15932 | NM_004419 | 529_at | P | P | 1.6 | 0.207 | | | |
| Homo sapiens cDNA 3′, mRNA | AI557322 | | 39611_at | P | P | 1.6 | 0.081 | | | |
| sequence | | | | | | | | | | |
| monoamine oxidase A (MAOA) | M68840 | NM_000240 | 41772_at | P | P | 1.6 | 0.148 | | | |
| monoamine oxidase A | AA420624 | NM_000240 | 41771_g_at | P | P | 1.4 | 0.230 | | | |
| NECDIN related protein | U35139 | NM_002487 | 36073_at | P | P | 1.6 | 0.245 | | | |
| regulatory solute carrier protein, | X82877 | NM_006511 | 31695_g_at | A | P | 1.6 | 0.916 | | | |
| family 1, member 1 | | | | | | | | | | |
| TTK protein kinase | M86699 | NM_003318 | 572_at | P | P | 1.6 | 0.196 | | | |
| fms-related tyrosine kinase 4, | X69878 | NM_002020 | 403_s_at | A | P | 1.5 | 0.403 | + | + | 1.1 |
| VEGFR-3 | | | | | | | | | | |
| TSC403, similar to lysosome- | AB013924 | NM_014398 | 37168_at | P | P | 1.5 | 0.164 | | | |
| associated membrane glycoprotein | | | | | | | | | | |
| HMG-2 | X62534 | | 38065_at | P | P | 1.5 | 0.105 | | | 1.1 |
| Homo sapiens clone 24416 mRNA | AF052159 | | 35342_at | P | P | 1.5 | 0.253 | | | |
| sequence | | | | | | | | | | |
| calcitonin receptor-like | L76380 | NM_005795 | 34995_at | P | P | 1.5 | 0.509 | | | 1.4 |
| KIAA0582 protein | AI761647 | NM_015147 | 40191_s_at | M | P | 1.5 | 0.558 | | | 1.4 |
| cDNA DKFZp434B102 (from clone | AL080192 | | 38630_at | A | P | 1.5 | 0.719 | | | |
| DKFZp434B102) | | | | | | | | | | |
| cDNA DKFZp586G1922 (from clone | AL080110 | | 39600_at | P | P | 1.5 | 0.160 | | | |
| DKFZp586G1922) | | | | | | | | | | |
| Acyl-CoA synthetase 3 | D89053 | NM_004457 | 33880_at | P | P | 1.5 | 0.264 | | | |
| fatty-acid-Coenzyme A ligase, long- | AA977580 | NM_004457 | 33881_at | P | P | 1.0 | 0.120 | | | 1.7 |
| chain 3 | | | | | | | | | | |
| STAT induced STAT inhibitor-2 | AF037989 | | 38994_at | A | P | 1.5 | 0.391 | | | |
| Homeotic Protein Hox5.4 | HG3502-HT3696 | | 696_at | P | P | 1.5 | 0.181 | | | |
| hypothetical protein FLJ13910, | AL050139 | NM_022780 | 36580_at | P | P | 1.5 | 0.228 | | | |
| cDNA DKFZp586M141 (from clone | | | | | | | | | | |
| DKFZp586M141) | | | | | | | | | | |
| cDNA DKFZp586N012 (from clone | AL049471 | | 41690_at | P | P | 1.4 | 0.320 | | | |
| DKFZp586N012) | | | | | | | | | | |
| UbcH10, ubiquitin carrier protein E2-C | U73379 | NM_007019 | 1651_at | P | P | 1.4 | 0.022 | | | 1.1 |
| cyclin-dependent kinase inhibitor 3, | L25876 | NM_005192 | 1599_at | P | P | 1.4 | 0.431 | | | |
| protein tyrosine phosphatase (CIP2) | | | | | | | | | | |
| glycogen phosphorylase (PYGL) | AF046798 | | 37215_at | P | P | 1.4 | 0.423 | | | 1.5 |
| Angiopoietin-2 | AF004327 | NM_001147 | 1951_at | P | P | 1.4 | 0.175 | + | | 1.2 |
| Angiopoietin-2 | AF004327 | NM_001147 | 37461_at | P | P | 1.2 | 0.134 | + | | |
| forkhead box M1 | U74612 | NM_021953 | 34715_at | M | P | 1.4 | 0.367 | | | 1.4 |
| potentially prenylated protein | AF041434 | NM_007079 | 36008_at | A | P | 1.4 | 0.094 | | | 2.3 |
| tyrosine phosphatase hPRL-3 | | | | | | | | | | |
| RAB31, Low Mr GTP-binding | U59877 | NM_006868 | 33371_s_at | P | P | 1.4 | 0.299 | | | |
| protein of the Rab subfamily | | | | | | | | | | |
| RAB31, member RAS oncogene | AI189226 | NM_006868 | 33372_at | P | P | 1.2 | 0.444 | | | |
| family | | | | | | | | | | |
| myosin VIIA | U39226 | NM_000260 | 33197_at | P | P | 1.4 | 0.038 | | | 1.2 |
| Grb2-associated binder-1, docking | U43885 | NM_002039 | 1249_at | A | P | 1.4 | 0.073 | | | |
| protein related to IRS-1 | | | | | | | | | | |
| lamin B1 | L37747 | | 37985_at | P | P | 1.4 | 0.643 | | | |
| minichromosome maintenance | D84557 | NM_005915 | 40117_at | P | P | 1.4 | 0.170 | | | 1.8 |
| deficient (mis5, S. pombe) 6 | | | | | | | | | | |
| HsMcm6 | | | | | | | | | | |
| cyclin B1 | M25753 | | 1945_at | P | P | 1.4 | 0.398 | | | |
| cyclin B1 | M25753 | | 34736_at | P | P | 1.3 | 0.160 | | | |
| RTP, N-myc downstream regulated | D87953 | NM_006096 | 36933_at | P | P | 1.4 | 0.131 | | | |
| alpha2,3-sialyltransferase | AB022918 | NM_006100 | 39298_at | P | P | 1.4 | 0.150 | | | |
| ADP-ribosylation factor-like protein 4 | U73960 | NM_005738 | 33796_at | P | P | 1.4 | 0.281 | | | |
| centromere protein F (350/400 kD, | U30872 | NM_016343 | 37302_at | A | P | 1.4 | 0.245 | | | |
| mitosin) | | | | | | | | | | |
| paternally expressed 10, KIAA1051 | AB028974 | NM_015068 | 39696_at | P | P | 1.4 | 0.300 | | | 4.2 |
| tubulin, alpha 1 (testis specific) | X06956 | | 36591_at | M | P | 1.4 | 0.300 | | | 1.8 |
| KIAA0101 | D14657 | NM_014736 | 38116_at | P | P | 1.4 | 0.409 | | | |
| KIAA0128, septin 2 | D50918 | | 38826_at | P | P | 1.4 | 0.381 | | | 1.8 |
| protein phosphatase 2, regulatory | Z69030 | NM_002719 | 40785_g_at | P | P | 1.4 | 0.453 | | | |
| subunit B (B56), gamma | | | | | | | | | | |
| deoxycytidine kinase | M60527 | NM_000788 | 886_at | A | P | 1.3 | 0.455 | | | |
| integrin beta 3 binding protein | U37139 | NM_014288 | 38501_s_at | P | P | 1.3 | 0.171 | | | |
| (beta3-endonexin) | | | | | | | | | | |
| TAL1 (SCL) interrupting locus | M74558 | NM_003035 | 32767_at | M | P | 1.3 | 0.150 | | | |
| KIAA0666 | AB014566 | | 33753_at | P | P | 1.3 | 0.356 | | | |
| cAMP-specific phosphodiesterase | AF056490 | | 37676_at | P | P | 1.3 | 0.222 | | | |
| 8A, PDE8A1 | | | | | | | | | | |
| mitotic checkpoint kinase Mad3L | AF053306 | NM_001211 | 35699_at | P | P | 1.3 | 0.216 | | | 1.6 |
| (MAD3L), BUB1B | | | | | | | | | | |
| ribosomal S6 kinase | X85106 | NM_021135 | 32892_at | P | P | 1.3 | 0.145 | | | |
| HPTP epsilon (protein tyrosine | X54134 | NM_006504 | 32916_at | P | P | 1.3 | 0.100 | | | 1.0 |
| phosphatase epsilon) | | | | | | | | | | |
| Lyn tyrosine kinase, v-yes-1 | M79321 | NM_002350 | 2024_s_at | P | P | 1.3 | 0.054 | + | | |
| Yamaguchi sarcoma viral related | | | | | | | | | | |
| oncogene homolog | | | | | | | | | | |
| lyn tyrosine kinase, v-yes-1 | M16038 | NM_002350 | 1402_at | P | P | 1.3 | 0.382 | + | | |
| Yamaguchi sarcoma viral related | | | | | | | | | | |
| oncogene homolog | | | | | | | | | | |
| lyn tyrosine kinase | M16038 | NM_002350 | 32616_at | P | P | 1.2 | 0.066 | + | | |
| brachyury variant A (TBX1), T-box 1 | AF012130 | NM_005992 | 32285_g_at | P | P | 1.3 | 0.352 | | | |
| transcription factor | | | | | | | | | | |
| mki67a mRNA (long type) for | X65550 | NM_002417 | 418_at | A | P | 1.3 | 0.357 | | | 1.5 |
| antigen of monoclonal antibody Ki- | | | | | | | | | | |
| 67 | | | | | | | | | | |
| protein tyrosine phosphatase receptor | U81561 | NM_002847 | 36160_s_at | P | P | 1.3 | 0.193 | | | |
| pi (PTPRP) | | | | | | | | | | |
| cbl-b | U26710 | NM_004351 | 514_at | A | P | 1.3 | 0.482 | | | |
| Cyclin A2 | X51688 | NM_001237 | 1943_at | P | P | 1.3 | 0.277 | | | |
| nucleoside phosphorylase | X00737 | NM_000270 | 430_at | P | P | 1.3 | 0.272 | | | |
| TNF-related apoptosis inducing | U37518 | NM_003810 | 1715_at | P | P | 1.3 | 0.316 | | | |
| ligand TRAIL | | | | | | | | | | |
| phosphodiesterase 4B, cAMP- | L20971 | NM_002600 | 33705_at | P | P | 1.3 | 0.275 | | | |
| specific | | | | | | | | | | |
| nidogen (enactin) | M30269 | NM_002508 | 35366_at | P | P | 1.3 | 0.050 | | | |
| HYA22 protein | D88153 | NM_005808 | 40196_at | P | P | 1.3 | 0.150 | | | 1.3 |
| phosphatidic acid phosphatase type | AF014402 | NM_003711 | 34797_at | P | P | 1.3 | 0.191 | | | |
| 2A | | | | | | | | | | |
| KIAA0512, ALEX2 | AB011084 | NM_014782 | 36057_at | P | P | 1.2 | 0.268 | | | |
| thromboxane A2 receptor | D38081 | NM_001060 | 336_at | M | P | 1.2 | 0.385 | | | 2.4 |
| trefoil factor 3 (intestinal) | AI985964 | NM_003226 | 37897_s_at | P | P | 1.2 | 0.183 | | | |
| G-2 and S-phase expressed 1 | AL031588 | NM_016426 | 41660_at | A | P | 1.2 | 0.424 | | | 3.1 |
| ADP-ribosyltransferase (NAD+; poly | AJ236876 | NM_005484 | 34756_g_at | M | P | 1.2 | 0.362 | | | 1.1 |
| (ADP-ribose) polymerase)-like 2 | | | | | | | | | | |
| serine/threonine kinase 12 | AF015254 | NM_004217 | 33266_at | P | P | 1.2 | 0.126 | | | |
| Tubulin, Alpha 1, Isoform 44 | HG2259-HT2348 | | 330_s_at | P | P | 1.2 | 0.096 | | | 1.1 |
| lamin B receptor | L25931 | NM_002296 | 288_s_at | P | P | 1.2 | 0.141 | | | |
| KIAA0429 | AB007889 | NM_014751 | 37363_at | P | P | 1.2 | 0.150 | | | 2.5 |
| transcription factor 4 | M74719 | NM_003199 | 36605_at | P | P | 1.2 | 0.050 | | | 1.1 |
| syndecan 3 (N-syndecan), KIAA0468 | AB007937 | NM_014654 | 32092_at | P | P | 1.2 | 0.206 | | | 1.0 |
| RECK protein precursor | AA099265 | NM_021111 | 35236_g_at | P | P | 1.2 | 0.173 | | | |
| Putative prostate cancer tumor | U42349 | NM_006765 | 36852_at | P | P | 1.1 | 0.082 | | | 1.1 |
| suppressor | | | | | | | | | | |
| protein phosphatase 1, regulatory | AB020630 | | 41577_at | P | P | 1.1 | 0.082 | | | |
| (inhibitor) subunit | | | | | | | | | | |
| PDZ and LIM domain 1 (elfin) | U90878 | NM_020992 | 36937_s_at | P | P | 1.1 | 0.096 | | | |
| hypothetical protein from clone 643 | AF091087 | NM_020467 | 34176_at | P | P | 1.1 | 0.096 | | | 1.1 |
| p53-regulated DDA3 | AA926959 | | 37347_at | P | P | 1.1 | 0.058 | | | |
| KIAA0062 | D31887 | | 38797_at | P | P | 1.1 | 0.058 | | | |
| medium-chain acyl-CoA | M91432 | | 37532_at | P | P | 1.1 | 0.308 | | | |
| dehydrogenase | | | | | | | | | | |
| gap junction protein, alpha 1, 43 kD | M65188 | NM_000165 | 2018_at | P | P | 1.1 | 0.329 | | | |
| (connexin 43) | | | | | | | | | | |
| MyoD family inhibitor | U78313 | NM_005586 | 38156_at | P | P | 1.1 | 0.381 | | | |
| endo/exonuclease Mre11 (MRE11A) | AF073362 | NM_005591 | 32869_at | P | P | 1.1 | 0.642 | | | |
| nuclear receptor subfamily 2, group | X16155 | NM_005654 | 39294_at | A | P | 1.0 | 0.446 | | | |
| F, member 1 | | | | | | | | | | |

¹A measurement indicating whether the transcript was detected (present, P), not detected (absent, A) or marginally detected (marginal, M; also if P in one experiment but A in another)
²The change in expression level for a transcript between two independently harvested BECs and LECs (=total of 4 comparisons). The change is expressed as the log2 ratio.
³Standard deviation of the change in the expression level (in 4 comparisons)
NB = Northern blot,
IF = immunofluorescence

[0261] TABLE 4
Blood Vascular EC (222 genes)

| | | | | | | Gene expression | | | | |
|---|---|---|---|---|---|---|---|---|---|---|
| | | | | | | analysis | | Confirmed | | |
| | accession | | Affymetrix | Detection¹ | | signal log | | by: | | signal log |
| | numbers | | ID | BEC | LEC | ratio² | s.d.³ | NB | IF | ratio |
| p27 mRNA, interferon alpha- | X67325 | NM_005532 | 425_at | P | A | 8.3 | 0.620 | | | 1.5 |
| inducible protein 27 | | | | | | | | | | |
| ribonuclease A (RNase A), | D26129 | NM_002933 | 37402_at | P | A | 7.2 | 0.208 | | | 2.7 |
| pancreatic | | | | | | | | | | |
| hematopoietic neural membrane | U87947 | NM_001425 | 39182_at | P | A | 5.9 | 0.381 | | | 1.6 |
| protein (HNMP-1) | | | | | | | | | | |
| N-cadherin | M34064 | NM_001792 | 2054_g_at | P | A | 5.7 | 1.345 | | + | |
| N-cadherin | M34064 | NM_001792 | 2053_at | P | P | 3.7 | 0.514 | | + | |
| interleukin 8 (IL8) | M28130 | NM_000584 | 1369_s_at | P | A | 5.3 | 1.477 | + | | |
| interleukin 8, beta- | M17017 | NM_000584 | 35372_r_at | P | P | 2.8 | 0.406 | + | | 1.1 |
| thromboglobulin-like protein | | | | | | | | | | |
| precursor | | | | | | | | | | |
| tyrosine kinase receptor (axl) | M76125 | NM_001699 | 38433_at | P | A | 5.1 | 1.112 | + | | 1.0 |
| Tyrosine Kinase, Receptor Axl, Alt. | HG162- | | 1278_at | P | A | 4.7 | 0.937 | + | | 1.1 |
| Splice 2 | HT3165 | | | | | | | | | |
| cell surface glycoprotein CD44 | L05424 | | 1126_s_at | P | A | 4.9 | 1.527 | | | 1.9 |
| (CD44) | | | | | | | | | | |
| cell adhesion molecule (CD44) | M59040 | NM_000610 | 2036_s_at | P | A | 1.9 | 0.402 | | | 2.6 |
| hyaluronate receptor (CD44) | L05424 | | 40493_at | P | P | 1.9 | 0.136 | | | 2.0 |
| vascular endothelial growth factor | U43142 | NM_005429 | 159_at | P | A | 4.6 | 0.850 | + | | |
| related protein VRP, VEGF-C | | | | | | | | | | |
| Vascular endothelial growth factor C | X94216 | NM_005429 | 1934_s_at | P | A | 4.4 | 1.342 | + | | |
| collagen type XIII, alpha 1 | M33653 | NM_005203 | 38952_s_at | P | A | 4.5 | 0.213 | | | 2.7 |
| (=COL4A2) | | | | | | | | | | |
| collagen type XIII, alpha-1 | M59217 | NM_005203 | 38951_at | P | A | 3.6 | 1.683 | | | 1.1 |
| collagen alpha-2 type I | K01079 | | 32306_g_at | P | A | 4.5 | 2.161 | | | |
| collagen alpha-2 type I | K01079 | | 32305_at | P | A | 2.8 | 1.464 | | | |
| collagen, type I, alpha 2 | V00503 | NM_000089 | 32307_s_at | P | A | 2.4 | 1.394 | | | |
| proteoglycan 1 | X17042 | NM_002727 | 32227_at | P | P | 4.3 | 0.385 | | | 1.0 |
| phospholipase A2, group IVA, | M72393 | | 35938_at | P | A | 4.3 | 2.398 | | | 1.9 |
| calcium-dependent phospholipid- | | | | | | | | | | |
| binding protein (PLA2) | | | | | | | | | | |
| carbohydrate (keratan sulfate Gal-6) | AB003791 | NM_003654 | 41395_at | P | P | 4.2 | 0.232 | | | |
| sulfotransferase | | | | | | | | | | |
| tropomyosin 2 (beta), fibroblast | M12125 | NM_003289 | 32314_g_at | P | A | 4.2 | 1.845 | | | |
| tropomyosin | | | | | | | | | | |
| chondroitin sulfate proteoglycan 2 | X15998 | NM_004385 | 38111_at | P | A | 4.1 | 1.746 | | | 1.5 |
| (versican) | | | | | | | | | | |
| chondroitin sulfate proteoglycan 2 | X15998 | NM_004385 | 38112_g_at | P | A | 2.0 | 1.219 | | | |
| (versican) | | | | | | | | | | |
| latent transforming growth factor- | Z37976 | NM_000428 | 37906_at | P | P | 4.1 | 0.381 | | | 1.1 |
| beta binding protein (LTBP-2) | | | | | | | | | | |
| interleukin 6 (interferon, beta 2) | X04430 | NM_000600 | 38299_at | P | A | 4.0 | 0.776 | | | 2.0 |
| bone morphogenetic protein-4 | U43842 | NM_001202 | 40333_at | P | A | 4.0 | 0.883 | | | |
| (hBMP-4) | | | | | | | | | | |
| bone morphogenetic protein 2B, | M22490 | NM_001202 | 1114_at | P | A | 2.6 | 1.146 | | | |
| BMP-4 | | | | | | | | | | |
| sarcolectin, keratin 7 | AJ238246 | NM_005556 | 41294_at | P | P | 3.9 | 0.631 | | | |
| neuronal cell adhesion molecule, | AB002341 | NM_005010 | 37286_at | P | A | 3.9 | 1.642 | | | 1.8 |
| KIAA0343 | | | | | | | | | | |
| neuronal cell adhesion molecule, | U55258 | NM_005010 | 37288_g_at | P | A | 1.5 | 0.309 | | | |
| hBRAVO/Nr-CAM precursor | | | | | | | | | | |
| matrix metalloproteinase 1 | M13509 | NM_002421 | 38428_at | P | P | 3.9 | 0.521 | + | | |
| (interstitial collagenase), skin | | | | | | | | | | |
| collagenase | | | | | | | | | | |
| stem cell factor, KIT ligand | M59964 | NM_000899 | 597_at | P | A | 3.9 | 0.554 | + | | |
| uPA | X02419 | NM_002658 | 37310_at | P | A | 3.8 | 0.282 | | | 3.0 |
| plasminogen activator inhibitor-1 | J03764 | NM_000602 | 672_at | P | P | 3.7 | 0.161 | | | 1.6 |
| plasminogen activator inhibitor 1 | M14083 | NM_000602 | 38125_at | P | P | 2.9 | 0.118 | | | 1.9 |
| selectin P, CD62, granule | M25322 | NM_003005 | 40366_at | P | P | 3.6 | 1.869 | | | 1.2 |
| membrane protein-140 (GMP-140) | | | | | | | | | | |
| precursor | | | | | | | | | | |
| latrophilin-2 | AJ131581 | NM_012302 | 34174_s_at | P | A | 3.6 | 0.098 | | | 1.1 |
| actin, alpha 2 | X13839 | NM_001613 | 32755_at | P | P | 3.6 | 1.067 | | | |
| fibroblast activation protein, alpha | U09278 | NM_004460 | 39945_at | P | A | 3.6 | 0.789 | | | 1.2 |
| regulator of G-protein signalling 20 | AF060877 | NM_003702 | 41086_at | P | A | 3.5 | 0.615 | | | |
| IGF-II mRNA-binding protein 3 | U97188 | NM_006547 | 37558_at | P | P | 3.5 | 0.528 | | | 2.1 |
| retina cDNA randomly primed | W28438 | | 36497_at | P | A | 3.5 | 0.414 | | | |
| sublibrary, EST | | | | | | | | | | |
| brain acid-soluble protein 1, | AF039656 | NM_006317 | 32607_at | P | A | 3.4 | 0.104 | | | 1.6 |
| neuronal tissue-enriched acidic | | | | | | | | | | |
| protein (NAP-22) | | | | | | | | | | |
| profilin 2 | AL096719 | NM_002628 | 38839_at | P | P | 3.4 | 0.111 | | | 1.6 |
| profilin 2 | L10678 | NM_002628 | 38840_s_at | P | P | 3.1 | 0.076 | | | 1.6 |
| Na,K-ATPase beta-1 subunit | U16799 | NM_001677 | 37669_s_at | P | A | 3.4 | 0.249 | | | |
| Claudin-7 | AJ011497 | NM_001307 | 38482_at | P | A | 3.4 | 0.798 | | | |
| normal gingiva | U51712 | | 39698_at | P | A | 3.4 | 0.391 | | | 1.1 |
| a disintegrin and metalloproteinase | AB009672 | NM_003812 | 40350_at | P | A | 3.4 | 0.600 | | | |
| domain 23 | | | | | | | | | | |
| COL8A1 mRNA for alpha 1(VIII) | X57527 | NM_001850 | 37459_at | P | A | 3.3 | 0.819 | + | | 1.7 |
| collagen | | | | | | | | | | |
| signal transducer and activator of | AF067575 | | 41222_at | P | P | 3.3 | 0.338 | + | + | 1.8 |
| transcription 6 (STAT6) | | | | | | | | | | |
| transcription factor IL-4 Stat, | U16031 | NM_003153 | 845_at | P | A | 2.1 | 0.493 | + | + | 1.6 |
| STAT6 | | | | | | | | | | |
| lipocortin-III, annexin A3 | M20560 | NM_005139 | 31792_at | P | P | 3.3 | 0.265 | | | 1.1 |
| intercellular adhesion molecule 1 | M24283 | NM_000201 | 32640_at | P | A | 3.2 | 0.184 | + | | |
| (CD54), major group rhinovirus | | | | | | | | | | |
| receptor precusor | | | | | | | | | | |
| solute carrier family 1 | U08989 | NM_004170 | 38268_at | P | A | 3.2 | 0.687 | | | 1.3 |
| (neuronal/epithelial high affinity | | | | | | | | | | |
| glutamate transporter, system Xag) | | | | | | | | | | |
| solute carrier family 1 | AI928365 | NM_004170 | 38267_at | P | A | 2.6 | 0.524 | | | 1.2 |
| (neuronal/epithelial high affinity | | | | | | | | | | |
| glutamate transporter, system Xag) | | | | | | | | | | |
| p53 inducible protein | L47738 | | 37579_at | P | A | 3.2 | 0.249 | | | 1.0 |
| dihydropyrimidine dehydrogenase, | U20938 | NM_000110 | 38220_at | P | A | 3.2 | 0.306 | | | |
| DPYD | | | | | | | | | | |
| natural killer cell transcript 4 | AA631972 | NM_004221 | 39119_s_at | P | P | 3.1 | 0.082 | | | 1.6 |
| PFTAIRE protein kinase 1, | AB020641 | NM_012395 | 36502_at | P | A | 3.1 | 0.841 | | | |
| KIAA0834 | | | | | | | | | | |
| RGP4, regulator of G-protein | U27768 | NM_005613 | 34272_at | P | A | 3.0 | 0.396 | | | 1.5 |
| signalling 4 | | | | | | | | | | |
| regulator of G-protein signalling 4 | AI267373 | NM_005613 | 34273_at | P | A | 2.6 | 0.473 | | | 1.5 |
| Oncogene Aml1-Evi-1, Fusion | HG4058- | | 1882_g_at | P | M | 2.9 | 0.590 | | | 1.5 |
| Activated | HT4328 | | | | | | | | | |
| Oncogene Aml1-Evi-1, Fusion | HG4058- | | 1881_at | P | A | 2.0 | 0.374 | | | |
| Activated | HT4328 | | | | | | | | | |
| adenylyl cyclase-associated protein 2 | N90755 | NM_006366 | 33405_at | P | A | 2.8 | 0.596 | | | 1.5 |
| clusterin (complement lysis | M25915 | NM_001831 | 36780_at | P | P | 2.8 | 0.161 | | | |
| inhibitor, SP-40, 40, sulfated | | | | | | | | | | |
| glycoprotein 2, apolipoprotein J) | | | | | | | | | | |
| ADP ribosylation factor-like 7 | AB016811 | NM_005737 | 39829_at | P | A | 2.7 | 0.531 | | | |
| H factor (complement)-like 1 | M65292 | NM_002113 | 32249_at | P | A | 2.7 | 0.589 | | | |
| RNA helicase-related protein, | H68340 | NM_007372 | 41446_f_at | P | P | 2.7 | 0.296 | | | |
| metallothionein-If | | | | | | | | | | |
| stimulated trans-acting factor | X82200 | NM_006074 | 36825_at | P | A | 2.7 | 0.730 | | | 6.2 |
| (50 kDa) Staf50 | | | | | | | | | | |
| cyclooxygenase-2 (hCox-2) | U04636 | NM_000963 | 1069_at | P | A | 2.6 | 1.281 | | | |
| GRO1 oncogene, melanoma growth | X54489 | NM_001511 | 408_at | P | A | 2.6 | 0.369 | | | |
| stimulatory activity (MGSA) | | | | | | | | | | |
| NRGN, neurogranin | X99076 | NM_006176 | 33925_at | M | A | 2.6 | 1.237 | | | |
| homologue of mouse dkk-1 | AB020315 | | 35977_at | P | A | 2.5 | 0.398 | | | |
| gastrointestinal tumor-associated | J04152 | NM_002353 | 291_s_at | P | P | 2.5 | 0.139 | | | |
| antigen GA733-1, tumor-associated | | | | | | | | | | |
| calcium signal transducer 2 | | | | | | | | | | |
| laminin | Z15008 | NM_005562 | 35280_at | P | A | 2.5 | 0.824 | | | |
| transgelin, 22 kDa smooth muscle | M95787 | NM_003186 | 36931_at | P | A | 2.5 | 0.980 | | | |
| protein (SM22) | | | | | | | | | | |
| JE gene encoding a monocyte | M28225 | | 34375_at | P | P | 2.4 | 0.186 | | | 3.6 |
| secretory protein | | | | | | | | | | |
| zinc finger protein 238, RP58 | AJ223321 | NM_006352 | 35824_at | P | A | 2.4 | 0.498 | | | 3.2 |
| cathepsin C | X87212 | NM_001814 | 133_at | P | P | 2.4 | 0.244 | | | |
| tissue-type plasminogen activator | M15518 | NM_000930 | 33452_at | P | A | 2.4 | 0.479 | | | |
| (t-PA) | | | | | | | | | | |
| sushi-repeat protein | AF060567 | NM_014467 | 37805_at | P | A | 2.4 | 0.670 | | | |
| annexin A6 | D00510 | NM_001155 | 39082_at | P | A | 2.4 | 0.181 | | | 1.2 |
| EphrinB1 | U09303 | NM_004429 | 39721_at | P | A | 2.4 | 0.946 | | | |
| EphrinB1 | U09303 | NM_004429 | 188_at | P | A | 1.2 | 0.489 | | | |
| TFEC isoform (transcription factor | D43945 | NM_012252 | 34470_at | P | A | 2.4 | 0.028 | | | 3.1 |
| EC) | | | | | | | | | | |
| small inducible cytokine A2, | M26683 | NM_002982 | 875_g_at | P | P | 2.3 | 0.283 | | | 3.5 |
| (monocyte chemotactic protein1) | | | | | | | | | | |
| small inducible cytokine A2 | M26683 | NM_002982 | 874_at | P | A | 1.2 | 0.385 | | | |
| (monocyte chemotactic protein 1) | | | | | | | | | | |
| endothelial cell protein C/APC | L35545 | NM_006404 | 647_at | P | P | 2.3 | 0.259 | | | 2.2 |
| receptor (EPCR) | | | | | | | | | | |
| transglutaminase 2 (TGase) | M55153 | NM_004613 | 231_at | P | M | 2.3 | 0.413 | | | |
| transglutaminase (TGase) | M55153 | NM_004613 | 38404_at | P | P | 1.6 | 0.093 | | | |
| human metallothionein-If | M10943 | | 31622_f_at | P | M | 2.3 | 0.230 | | | |
| transforming growth factor beta- | M77349 | NM_000358 | 1385_at | P | A | 2.3 | 0.951 | | | |
| induced (BIGH3) | | | | | | | | | | |
| ENO2 gene for neuron specific | X51956 | | 40193_at | P | A | 2.3 | 0.121 | | | 1.6 |
| (gamma) enolase | | | | | | | | | | |
| FAT tumor suppressor (Drosophila) | X87241 | NM_005245 | 40454_at | P | A | 2.3 | 1.204 | | | |
| homolog | | | | | | | | | | |
| malignant cell expression-enhanced | S82470 | NM_024298 | 181_g_at | P | P | 2.2 | 0.469 | | | |
| gene/tumor progression-enhanced | | | | | | | | | | |
| gene | | | | | | | | | | |
| malignant cell expression-enhanced | S82470 | NM_024298 | 180_at | P | A | 1.7 | 0.420 | | | |
| gene/tumor progression-enhanced | | | | | | | | | | |
| gene | | | | | | | | | | |
| cDNA DKFZp566G0746 (from | AL050078 | | 39324_at | P | A | 2.2 | 1.281 | | | |
| clone DKFZp566G0746) | | | | | | | | | | |
| lysyl oxidase-like 2 | U89942 | NM_002318 | 33127_at | P | P | 2.2 | 0.274 | | | |
| ras-related C3 botulinum toxin | M64595 | NM_002872 | 32737_at | P | P | 2.2 | 0.143 | | | 3.5 |
| substrate 2 (rho family, small GTP | | | | | | | | | | |
| binding protein Rac2) | | | | | | | | | | |
| endothelial leukocyte adhesion | M24736 | NM_000450 | 265_s_at | P | A | 2.2 | 0.448 | | | |
| molecule 1 (ELAM-1), selectin E | | | | | | | | | | |
| laminin, alpha 5, KIAA0533 | AB011105 | | 41610_at | P | P | 2.2 | 0.146 | | | |
| placenta growth factor (P1GF) | X54936 | NM_002632 | 793_at | P | P | 2.2 | 0.301 | + | | 1.0 |
| ALL1-fused gene from | U16954 | NM_006818 | 36941_at | P | P | 2.2 | 0.592 | | | |
| chromosome 1q, AF1q | | | | | | | | | | |
| stromelysin-2, MMP-10 | X07820 | NM_002425 | 1006_at | P | P | 2.1 | 0.159 | | | 1.0 |
| metallothionein-I-A | K01383 | | 31623_f_at | P | P | 2.1 | 0.238 | | | |
| collagen VI alpha-1 | X15880 | | 38722_at | P | A | 2.1 | 0.898 | | | |
| mad protein homolog (hMAD-3) | U68019 | NM_005902 | 1433_g_at | P | A | 2.1 | 0.269 | | | 1.1 |
| mad protein homolog (hMAD-3) | U68019 | NM_005902 | 38944_at | P | A | 1.8 | 0.367 | | | 1.4 |
| mad protein homolog (hMAD-3) | U68019 | NM_005902 | 1454_at | P | A | 2.0 | 0.304 | | | |
| integral membrane protein 2A | AL021786 | | 40775_at | P | P | 2.1 | 0.570 | | | |
| interleukin 1 receptor-like 1 | D12763 | NM_003856 | 40322_at | P | A | 2.1 | 0.718 | | | |
| high-mobility group (nonhistone | X92518 | | 35200_at | P | A | 2.0 | 0.177 | | | |
| chromosomal) protein isoform I-C | | | | | | | | | | |
| (HMGI-C) | | | | | | | | | | |
| epidermal growth factor receptor | U12535 | NM_004447 | 1467_at | P | A | 2.0 | 0.710 | | | 1.0 |
| kinase substrate (Eps8) | | | | | | | | | | |
| lactate dehydrogenase B | X13794 | NM_002300 | 33819_at | P | P | 2.0 | 0.029 | | | 1.6 |
| mRNA for unknown product | D29810 | | 40227_at | P | A | 2.0 | 1.170 | | | |
| hypothetical protein | AL033377 | | 36014_at | P | A | 2.0 | 0.137 | | | 1.1 |
| DKFZp564D0462 | | | | | | | | | | |
| lysyl hydroxylase isoform 2 | U84573 | NM_000935 | 34795_at | P | P | 2.0 | 0.157 | | | |
| (PLOD2) | | | | | | | | | | |
| follistatin-like 3, follistatin-related | U76702 | NM_005860 | 33900_at | P | A | 2.0 | 0.075 | | | 2.6 |
| protein (FLRG) | | | | | | | | | | |
| Homo sapiens clone 24674 mRNA | AF070578 | | 36758_at | P | A | 2.0 | 0.612 | | | 1.8 |
| sequence | | | | | | | | | | |
| L-iditol-2 dehydrogenase | L29254 | | 38763_at | P | A | 1.9 | 0.140 | | | |
| neuronal pentraxin 1 | U61849 | NM_002522 | 37921_at | P | A | 1.9 | 0.744 | | | 2.5 |
| hypothetical protein from clones | U90908 | NM_021226 | 34010_at | P | A | 1.9 | 0.870 | | | |
| 23549 and 23762 | | | | | | | | | | |
| UDP-N-acetylglucosamine | AB011004 | NM_003115 | 41242_at | P | P | 1.9 | 0.342 | | | |
| pyrophosphorylase | | | | | | | | | | |
| zinc finger protein 185 (LIM | Y09538 | NM_007150 | 32139_at | P | A | 1.8 | 0.062 | | | 1.6 |
| domain) | | | | | | | | | | |
| four and a half LIM domains 2, | U29332 | NM_001450 | 38422_s_at | P | P | 1.8 | 0.229 | | | |
| heart protein (FHL-2) | | | | | | | | | | |
| mitogen-activated protein kinase- | U09578 | NM_004635 | 1637_at | P | A | 1.8 | 0.454 | | | 1.4 |
| activated protein kinase 3, | | | | | | | | | | |
| MAPKAP kinase (3pK) | | | | | | | | | | |
| metallothionein 1E (functional) | R92331 | | 36130_f_at | P | P | 1.8 | 0.131 | | | |
| TU3A protein | AF035283 | NM_007177 | 38044_at | P | A | 1.8 | 0.298 | | | 1.8 |
| metallothionein 1H | R93527 | NM_005951 | 39594_f_at | P | P | 1.8 | 0.415 | | | |
| guanylate binding protein isoform II | M55543 | NM_004120 | 32700_at | P | P | 1.8 | 0.304 | | | 1.1 |
| (GBP-2) | | | | | | | | | | |
| soluble vascular endothelial cell | U01134 | NM_002019 | 1964_g_at | P | M | 1.8 | 0.384 | + | | |
| growth factor receptor 1 (sVEGFR- | | | | | | | | | | |
| 1) | | | | | | | | | | |
| R-Ras | M14949 | | 38338_at | P | P | 1.8 | 0.119 | | | |
| R-ras | M14949 | | 1879_at | P | P | 1.2 | 0.330 | | | 1.5 |
| creatine transporter (SLC6A8), | U36341 | NM_005629 | 40926_at | P | A | 1.8 | 0.305 | | | |
| solute carrier family 6, member 8 | | | | | | | | | | |
| target of myb1 (chicken) homolog, | Z82244 | NM_005488 | 33802_at | P | P | 1.8 | 0.149 | | | |
| Heme Oxygenase 1 (HO-1) | | | | | | | | | | |
| procollagen-lysine, 2-oxoglutarate | L06419 | NM_000302 | 36184_at | P | P | 1.8 | 0.310 | | | |
| 5-dioxygenase, lysyl hydroxylase | | | | | | | | | | |
| (PLOD) | | | | | | | | | | |
| KIAA0836 | AB020643 | | 33296_at | P | P | 1.8 | 0.203 | | | 1.8 |
| cDNA DKFZp434C171 (from clone | AL080169 | | 34183_at | P | A | 1.8 | 0.606 | | | 1.2 |
| DKFZp434C171) | | | | | | | | | | |
| IL-4-R mRNA for the interleukin 4 | X52425 | NM_000418 | 404_at | P | P | 1.7 | 0.244 | | | |
| receptor | | | | | | | | | | |
| chemokine (C—C motif) receptor- | AF014958 | NM_003965 | 1445_at | P | A | 1.7 | 0.386 | | | 1.8 |
| like 2 (CCRL2), chemokine | | | | | | | | | | |
| receptor X (CKRX) | | | | | | | | | | |
| phospholipase C, beta 3 | Z16411 | NM_000932 | 364_s_at | P | A | 1.7 | 0.098 | | | |
| (phosphatidylinositol-specific) | | | | | | | | | | |
| LIM domain protein | X93510 | NM_003687 | 32610_at | P | P | 1.7 | 0.067 | | | 1.9 |
| protein kinase (cAMP-dependent, | M34181 | NM_002731 | 36215_at | P | A | 1.7 | 0.315 | | | 1.0 |
| catalytic) inhibitor beta | | | | | | | | | | |
| rho GDP-dissociation Inhibitor 2 | X69549 | NM_001175 | 1984_s_at | P | P | 1.7 | 0.163 | | | 2.4 |
| KIAA0975, imidazoline receptor | AB023192 | NM_007184 | 33916_at | P | A | 1.7 | 0.343 | | | |
| candidate | | | | | | | | | | |
| poliovirus receptor | X64116 | NM_006505 | 32698_at | P | P | 1.7 | 0.173 | | | |
| poliovirus receptor | X64116 | NM_006505 | 32699_s_at | P | P | 1.3 | 0.102 | | | |
| immediate early response 3 | S81914 | NM_003897 | 1237_at | P | P | 1.7 | 0.171 | | | |
| metallothionein 2A | AI547258 | NM_005953 | 39081_at | P | A | 1.7 | 0.247 | | | |
| tropomyosin 1 (alpha) | M19267 | NM_000366 | 36791_g_at | P | P | 1.6 | 0.184 | | | 1.0 |
| tropomyosin 1 (alpha) | Z24727 | NM_000366 | 36792_at | P | P | 1.4 | 0.094 | | | 1.3 |
| tropomyosin 1 (alpha) | M19267 | NM_000366 | 36790_at | P | P | 1.2 | 0.213 | | | |
| TRAM-like protein | D31762 | NM_012288 | 40051_at | P | P | 1.6 | 0.244 | | | 1.1 |
| E3 ubiquitin ligase SMURF2 | AA630312 | NM_022739 | 33354_at | P | P | 1.6 | 0.244 | | | 2.2 |
| EGF-containing fibulin-like | U03877 | NM_004105 | 32551_at | P | P | 1.6 | 0.152 | | | |
| extracellular matrix protein 1 | | | | | | | | | | |
| G protein-coupled receptor 56 | AJ011001 | NM_005682 | 35769_at | P | P | 1.6 | 0.075 | | | |
| c-jun proto oncogene (JUN) | J04111 | NM_002228 | 32583_at | P | A | 1.6 | 0.377 | | | |
| regulator of G-protein signalling 10, | AF045229 | NM_002925 | 33121_g_at | P | A | 1.6 | 0.064 | | | |
| RGS10 | | | | | | | | | | |
| amyloid beta (A4) precursor | U62325 | | 40148_at | P | P | 1.6 | 0.312 | | | 1.3 |
| protein-binding, family B, member | | | | | | | | | | |
| 2 (Fe65-like) | | | | | | | | | | |
| ras-related rho protein | M12174 | NM_004040 | 1826_at | P | P | 1.6 | 0.281 | | | 1.4 |
| proteasome (prosome, macropain) | AL031177 | NM_002814 | 37957_at | P | A | 1.5 | 0.265 | | | |
| 26S subunit, non-ATPase, 10 | | | | | | | | | | |
| KIAA0537 | AB011109 | NM_014840 | 33787_at | P | P | 1.5 | 0.135 | | | 1.8 |
| lysosome-associated membrane | X77196 | NM_002294 | 38403_at | P | P | 1.5 | 0.432 | | | |
| protein-2 | | | | | | | | | | |
| phospholipid transfer protein | L26232 | NM_006227 | 40081_at | P | P | 1.5 | 0.046 | | | |
| N-myristoyltransferase 2 | AF043325 | NM_004808 | 41656_at | P | P | 1.5 | 0.038 | | | |
| phosphofructokinase (PFKM) | U24183 | NM_000289 | 36196_at | P | P | 1.5 | 0.374 | | | 2.0 |
| integrin, beta 4 | X53587 | NM_000213 | 406_at | P | A | 1.5 | 0.195 | | | |
| leupaxin | AF062075 | NM_004811 | 36062_at | P | A | 1.5 | 0.231 | | | 1.3 |
| endothelin-converting-enzyme 1 | Z35307 | NM_001397 | 41726_at | P | P | 1.5 | 0.180 | | | |
| wild-type p53 activated fragment-1 | U03106 | NM_000389 | 2031_s_at | P | P | 1.5 | 0.399 | | | |
| (WAF1), cyclin-dependent kinase | | | | | | | | | | |
| inhibitor 1A (p21, Cip1) | | | | | | | | | | |
| ICAM-2, cell adhesion ligand for | X15606 | NM_000873 | 38453_at | P | P | 1.5 | 0.024 | | | 1.5 |
| LFA-1 | | | | | | | | | | |
| ICAM-2, cell adhesion ligand for | X15606 | NM_000873 | 38454_g_at | P | P | 1.5 | 0.153 | | | 2.0 |
| LFA-1 | | | | | | | | | | |
| intercellular adhesion molecule 2 | M32334 | | 590_at | P | P | 1.4 | 0.152 | | | 1.5 |
| (ICAM-2) | | | | | | | | | | |
| eukaryotic translation initiation | AF035280 | NM_014239 | 40515_at | P | P | 1.5 | 0.108 | | | |
| factor 2B, eIF-2B beta subunit | | | | | | | | | | |
| uridine phosphorylase | X90858 | NM_003364 | 37351_at | P | M | 1.5 | 0.064 | | | |
| integrin, beta 5 | X53002 | NM_002213 | 39754_at | P | P | 1.5 | 0.068 | | | |
| N-sulfoglucosamine sulfohydrolase | U30894 | NM_000199 | 35626_at | P | P | 1.5 | 0.077 | | | |
| (sulfamidase) | | | | | | | | | | |
| synaptojanin 2 | AF039945 | | 36532_at | P | A | 1.5 | 0.164 | | | 1.1 |
| metallothionein 1L | AA224832 | NM_002450 | 39120_at | P | A | 1.4 | 0.664 | | | |
| macrophage capping protein, | M94345 | NM_001747 | 38391_at | P | P | 1.4 | 0.281 | | | |
| gelsolin-like | | | | | | | | | | |
| HSPC022 protein | W68830 | NM_014029 | 32736_at | P | P | 1.4 | 0.062 | | | 2.7 |
| Human clone 137308 mRNA, | AW006742 | | 38207_at | P | A | 1.4 | 0.442 | | | |
| partial cds | | | | | | | | | | |
| protocadherin 42, PC42, | L11370 | NM_002587 | 37562_at | P | A | 1.4 | 0.166 | | | |
| protocadherin 1 (cadherin-like 1) | | | | | | | | | | |
| caspase-like apoptosis regulatory | AF005775 | NM_003879 | 1867_at | P | P | 1.4 | 0.363 | | | 1.5 |
| protein 2 (CLARP2) | | | | | | | | | | |
| caspase-like apoptosis regulatory | AF005775 | NM_003879 | 1868_g_at | P | P | 1.2 | 0.325 | | | 2.2 |
| protein 2 (CLARP2) | | | | | | | | | | |
| major vault protein, lrp | X79882 | NM_005115 | 38064_at | P | P | 1.4 | 0.252 | | | 1.0 |
| Fanconi anemia, complementation | AC004472 | NM_004629 | 33842_at | P | A | 1.4 | 0.233 | | | |
| group G | | | | | | | | | | |
| prion protein (PrP) | U29185 | NM_000311 | 36159_s_at | P | P | 1.4 | 0.342 | | | 1.1 |
| interferon-stimulated protein, 15 kDa | AA203213 | NM_005101 | 38432_at | P | A | 1.4 | 0.244 | | | |
| serine (or cysteine) proteinase | L40377 | NM_002640 | 36312_at | P | A | 1.3 | 0.360 | | | 2.2 |
| inhibitor, clade B (ovalbumin), | | | | | | | | | | |
| cytoplasmic antiproteinase 2 | | | | | | | | | | |
| (CAP2) | | | | | | | | | | |
| biglycan | J04599 | NM_001711 | 38126_at | P | P | 1.3 | 0.101 | | | |
| chemokine (C—X—C motif), | L06797 | NM_003467 | 649_s_at | P | P | 1.3 | 0.177 | + | | |
| receptor 4 (fusin) | | | | | | | | | | |
| ubiquitin carboxyl-terminal esterase | X04741 | NM_004181 | 36990_at | P | P | 1.3 | 0.117 | | | |
| L1 (ubiquitin thiolesterase) | | | | | | | | | | |
| KIAA0469 | AB007938 | NM_014851 | 37230_at | P | P | 1.3 | 0.124 | | | |
| TNF (ligand) superfamily, member | AL022310 | NM_003326 | 32319_at | P | A | 1.3 | 0.349 | | | |
| 4 (tax-transcriptionally activated | | | | | | | | | | |
| glycoprotein 1, 34 kD) | | | | | | | | | | |
| KIAA1053 | AB028976 | | 40855_at | P | P | 1.3 | 0.242 | | | 1.6 |
| NAD(P)H-quinone oxireductase | M81600 | | 38066_at | P | P | 1.3 | 0.058 | | | 1.8 |
| sushi-repeat-containing protein | U61374 | NM_006307 | 31855_at | P | P | 1.3 | 0.610 | | | 1.2 |
| integrin, alpha 5 | X06256 | NM_002205 | 39753_at | P | P | 1.3 | 0.179 | | + | 1.2 |
| enigma (LIM domain protein) | L35240 | NM_005451 | 39530_at | P | P | 1.3 | 0.396 | | | |
| ectonucleoside triphosphate | AJ133133 | NM_001776 | 32826_at | P | A | 1.3 | 0.412 | | | 1.5 |
| diphosphohydrolase 1 | | | | | | | | | | |
| transforming growth factor-beta | M60315 | NM_001718 | 39279_at | P | P | 1.3 | 0.206 | | | |
| (tgf-beta), bone morphogenetic | | | | | | | | | | |
| protein 6 | | | | | | | | | | |
| transforming growth factor-beta | M60315 | NM_001718 | 1733_at | P | P | 1.0 | 0.308 | | | |
| (tgf-beta), bone morphogenetic | | | | | | | | | | |
| protein 6 | | | | | | | | | | |
| nicotinamide N-methyltransferase, | U08021 | NM_006169 | 37032_at | P | P | 1.2 | 0.083 | | | 2.1 |
| NNMT | | | | | | | | | | |
| cDNA DKFZp564J0323 (from | AL049957 | | 39170_at | P | P | 1.2 | 0.264 | | | 1.2 |
| clone DKFZp564J0323) | | | | | | | | | | |
| thioredoxin reductase beta | AB019694 | NM_006440 | 41711_at | P | A | 1.2 | 0.206 | | | |
| f-box and leucine-rich repeat | AL049953 | | 36525_at | P | A | 1.2 | 0.300 | | | 1.2 |
| protein 2 | | | | | | | | | | |
| transcobalamin II (TCN2) | L02648 | NM_000355 | 37922_at | P | A | 1.2 | 0.342 | | | 1.2 |
| aldehyde dehydrogenase 2, | X05409 | NM_000690 | 32747_at | P | P | 1.2 | 0.117 | | | |
| mitochondrial | | | | | | | | | | |
| GTP-binding protein ragB | X90530 | NM_006064 | 39989_at | P | M | 1.2 | 0.602 | | | |
| lymphocyte antigen 75 | AF011333 | NM_002349 | 38160_at | P | A | 1.2 | 0.132 | | | 1.7 |
| GM2 activator protein | X62078 | | 35820_at | P | P | 1.2 | 0.101 | | | 1.5 |
| type 3 inositol 1,4,5-trisphosphate | U01062 | NM_002224 | 182_at | P | P | 1.2 | 0.052 | | | 1.5 |
| receptor (ITPR3) | | | | | | | | | | |
| KIAA0284 | AI828210 | | 38592_s_at | P | P | 1.2 | 0.078 | | | 1.9 |
| metallothionein I-B | M13485 | | 609_f_at | P | P | 1.2 | 0.266 | | | |
| BTG2 | U72649 | NM_006763 | 36634_at | P | P | 1.2 | 0.210 | | | |
| adenylate kinase 1 | J04809 | NM_000476 | 36997_at | P | A | 1.2 | 0.246 | | | |
| tumor necrosis factor receptor | Y09392 | NM_003790 | 41189_at | P | P | 1.2 | 0.350 | | | |
| superfamily, member 12, WSL-LR, | | | | | | | | | | |
| WSL-S1 and WSL-S2 proteins | | | | | | | | | | |
| aminopeptidase N/CD13 | M22324 | NM_001150 | 39385_at | P | P | 1.2 | 0.398 | | | |
| growth arrest and DNA-damage- | M60974 | NM_001924 | 1911_s_at | P | P | 1.2 | 0.177 | | | |
| inducible protein (gadd45) | | | | | | | | | | |
| KIAA0638 protein | AB014538 | | 37375_at | P | P | 1.2 | 0.680 | | | |
| vinculin | M33308 | NM_003373 | 36601_at | P | P | 1.2 | 0.078 | | + | |
| procollagen-proline, 2-oxoglutarate | U90441 | NM_004199 | 34390_at | P | P | 1.1 | 0.347 | | | |
| 4-dioxygenase (proline 4- | U65093 | NM_006079 | 33113_at | P | P | 1.1 | 0.164 | | | 1.2 |
| hydroxylase), alpha polypeptide II | | | | | | | | | | |
| msg1-related gene 1 (mrg1), | | | | | | | | | | |
| Cbp/p300-interacting transactivator | | | | | | | | | | |
| microsomal glutathione S- | AF026977 | NM_004528 | 39018_at | P | P | 1.1 | 0.191 | | | 1.1 |
| transferase 3 | | | | | | | | | | |
| vitamin A responsive; cytoskeleton | AF070523 | NM_006407 | 39091_at | P | P | 1.1 | 0.216 | | | 2.9 |
| related | | | | | | | | | | |
| 17-kDa protein, interferon- | M13755 | NM_005101 | 1107_s_at | P | P | 1.1 | 0.119 | | | |
| stimulated protein, 15 kDa | | | | | | | | | | |
| matrix metalloproteinase 14 | X83535 | NM_004995 | 34747_at | P | A | 1.1 | 0.487 | | | 2.4 |
| (membrane-inserted) | | | | | | | | | | |
| 4F2 cell-surface antigen, solute | J02939 | NM_002394 | 38029_at | P | P | 1.1 | 0.143 | | | |
| carrier family 3, member 2 | | | | | | | | | | |
| metallothionein-III | M93311 | NM_005954 | 870_f_at | P | P | 1.1 | 0.334 | | | |
| protein kinase (cAMP-dependent, | S76965 | NM_006823 | 36202_at | P | P | 1.1 | 0.046 | | | |
| catalytic) inhibitor alpha | | | | | | | | | | |
| protein kinase (cAMP-dependent, | S76965 | NM_006823 | 546_at | P | P | 1.0 | 0.367 | | | |
| catalytic) inhibitor alpha | | | | | | | | | | |
| reticulocalbin 1, EF-hand calcium | D42073 | NM_002901 | 40556_at | P | P | 1.1 | 0.035 | | | 1.1 |
| binding domain | | | | | | | | | | |
| lipin 1, KIAA0188 | D80010 | | 38098_at | P | P | 1.1 | 0.080 | | | 1.4 |
| protease, serine, 23 | AF015287 | NM_007173 | 40078_at | P | P | 1.0 | 0.099 | | | 1.3 |
| hect domain and RLD 2 | AF041080 | NM_004667 | 40877_s_at | P | P | 1.0 | 0.104 | | | |
| GATA-binding protein (GATA2) | M68891 | NM_002050 | 37194_at | P | P | 1.0 | 0.325 | | | 1.0 |
| agrin precursor | AF016903 | | 33454_at | P | P | 1.0 | 0.272 | | | |
| equilibrative nucleoside transporter | U81375 | NM_004955 | 33901_at | P | P | 1.0 | 0.352 | | | |
| 1 (hENT1) | | | | | | | | | | |
| coronin, actin-binding protein 2B, | AB023142 | | 34772_at | P | A | 1.0 | 0.459 | | | |
| KIAA0925 | | | | | | | | | | |
| f-box and WD-40 domain protein 3 | U07000 | NM_012165 | 537_f_at | P | M | 1.0 | 0.212 | | | |
| nonsyndromic hearing impairment | AF073308 | NM_004403 | 41872_at | P | P | 1.0 | 0.535 | | | 1.0 |
| protein (DFNA5) | | | | | | | | | | |
| actin filament associated protein | D25248 | NM_021638 | 37578_at | P | P | 1.0 | 0.218 | | | |
| TNFR-related death receptor-6 | AF068868 | NM_014452 | 35402_at | P | A | 1.0 | 0.235 | | | 1.7 |
| (DR6) | | | | | | | | | | |
| serum/glucocorticoid regulated | Y10032 | NM_005627 | 973_at | P | A | 1.0 | 0.174 | | | |
| kinase | | | | | | | | | | |
| DNase X | X90392 | NM_006730 | 37214_g_at | P | P | 1.0 | 0.507 | | | |
| DNase X | X90392 | NM_006730 | 37213_at | P | P | 1.0 | 0.376 | | | |
| fatty acid desaturase 3 | AC004770 | NM_021727 | 34224_at | P | P | 1.0 | 0.294 | | | |
| LYL-1 | M22637 | | 39971_at | P | P | 1.0 | 0.313 | | | 1.4 |
| ATP-binding cassette, sub-family C | X78338 | NM_004996 | 34016_s_at | P | A | 1.0 | 0.258 | | | 2.3 |
| (CFTR/MRP), member 1 | | | | | | | | | | |
| transmembrane protein (CD59) | M84349 | | 39351_at | P | P | 1.0 | 0.141 | | | 1.1 |
| fms-related tyrosine kinase 1, | S77812 | NM_002019 | 1545_g_at | P | P | 1.0 | 0.535 | + | | 1.9 |
| VEGFR-1 | | | | | | | | | | |

¹A measurement indicating whether the transcript was detected (present, P), not detected (absent, A) or marginally detected (marginal, M; also if P in one experiment but A in another)
²The change in expression level for a transcript between two independently harvested BECs and LECs (=total of 4 comparisons). The change is expressed as the log2 ratio.
³Standard deviation of the change in the expression level (in 4 comparisons)
NB = Northern blot,
IF = immunofluorescence

[0262] TABLE 10
Known LEC-specific genes

| | | Accession numbers | |
|---|---|---|---|
| Gene | Detection* | starting EST | possible gene |
| CD36 = | Af (S/4, 3) | R20784 | M98399 |
| COL1/TSP receptor, fatty-acid transport | | H54254 | |
| protein | | | |
| beta1-syntrophin | Af (S/4, 5) | AA447177 | L31529 |
| collectin sub-family member 12 | Af (S/4, 5) | R74387 | NM_030781 |
| a disintegrin and metalloprotease | Af (S/4, 3) | AA147933 | NM_003474 |
| domain 12 | | | |
| cytotoxic T-lymphocyte- | Af (S/4, 0) | AI733018 | NM_005214 |
| associated protein 4 | | | |
| niban protein NM_022083 niban | Af (S/3, 7) | AA554814 | NM_052966 |
| protein | | | |
| multi-PDZ-domain-containing | Af (S/3, 5) | AI738919 | NM_032622 |
| protein, LNX | | | |
| MAGE-E1 protein | Af (S/3, 2) | AI435112 | NM_030801 |
| upstream stimulatory factor 1, | Af (S/2, 6) | AA701033 | AB017568 |
| USF1 (genomic match) | | | |
| hairy/enhancer-of-split related | Af (NS/2, 6) | R61374 | NM_012258 |
| with YRPW motif 1 | | | |
| alpha-2,8-polysialyltransferase | Af (S/2, 5) | AI422986 | L41680 |
| semaphorin 6A1 | Af (S/2, 4) | W21965 | NM_020796 |
| guanine nucleotide binding | Af (S/2, 3) | AA738022 | |
| protein (G prot), gamma 2 | | | |
| integral membrane protein 3 | Af (S/2, 3) | AA128019 | NM_030926 |
| similar to mouse glucocorticoid- | Af (S/2, 0) | AI678080 | XM_070471 |
| induced gene 1 | | | |
| YAP65 (Yes-associated protein of | Af (NS/2, 0) | AL048399 | X80507 |
| 65 kDa MW) | | | |
| 17 kDa fetal brain protein | Af (NS/1, 9) | H92988 | NM_022343 |
| Kruppel-like factor 5 | Af (S/1, 8) | AI815057 | NM_001730 |
| calcitonin receptor-like, CGRP | Af (S/1, 7) | AI741128, | NM_005795, L76380 |
| type 1 receptor | | T94540 | |
| fibroblast growth factor 13, | Af (NS/1, 7) | AW014749 | NM_004114 |
| isoform 1A | | | |
| tetraspan NET-6 protein | Af (NS/1, 6) | W22687 | NM_014399 |
| ring finger protein 11 | Af (S/1, 6) | AL079648 | BC020964 |

*Af = Affymetrix, S = specific for LEC, NS = nonspecific (also expressed in BEC), numbers represent log2 ratio of the signal intensities between BEC and LEC

[0263] TABLE 11
Differentially expressed genes identified by accession number

| Gene | Detection* | starting EST | SEQ ID NO: |
|---|---|---|---|
| EST | Af (S/4, 9) | AL079386 | 1 |
| EST | Af (S/3, 7) | N21555 | 2 |
| EST | Af (S/3, 2) | AL119027 | 3 |
| EST | Af (S/2, 9) | H05299 | 4 |
| EST | Af (S/2, 8) | AA973128 | 5 |
| EST | Af (NS/2, 6) | AI128820 | |
| EST | Af (S/2, 3) | AW044647 | 6 |
| EST | Af (S/2, 2) | AI333058 | 7 |
| EST | Af (S/2, 1) | AI536067 | 8 |
| EST | Af (NS/2, 0) | AA156409 | |
| EST | Af (S/1, 9) | AI770080 | 9 |
| EST | Af (NS/1, 9) | AA456099 | |
| EST | Af (S/1, 8) | AI692645 | 10 |
| EST | Af (S/1, 7) | AL119265 | 11 |
| EST | Af (S/1, 6) | AI478114 | 12 |
| EST | Af (S/1, 6) | AI817448 | 13 |

*Af = Affymetrix, S = specific for LEC, NS = nonspecific (also expressed in BEC), numbers represent log2 ratio of the signal intensities between BEC and LEC

[0264] TABLE 12
Other Proteins Identified

| | | Accession numbers | |
|---|---|---|---|
| Gene | Detection* | starting EST | possible gene |
| KIAA1392, hypothetical protein | Af (S/5, 3) | N50545 | XM_048721 (20) |
| DKFZp762K222 | | | |
| similar to phosphoglucomutase 5 | Af (S/4, 5) | AL046941 | XM_047649 (21) |
| Similar to transmembrane | | | |
| receptor Unc5H1 | Af (S/4, 5) | R56359 | XM_030300 (22) |
| hypothetical protein MGC21854 | Af (S/3, 7) | AI659418 | NM_052862 (23) |
| KIAA1877 | Af (S/3, 4) | AW004016 | |
| similar to unnamed protein | | | |
| product | Af (NS/3, 1) | AA036952 | XM_085235 |
| unknown protein | Af (S/2, 9) | AA846091 | XM_038314 (24) |
| KIAA1058 (+missing N-term | Af (S/2, 6) | AA007697 | AB028981 (25) |
| from ests) | | | |
| similar to KIAA1673 | Af (S/2, 3) | AI948598 | XM_059607 (26) |
| similar to lysosomal amino acid | Af (S/2, 3) | AI692279 | XM_058449 (27) |
| transporter 1 | | | |
| Homo sapiens similar to | | | |
| KIAA1673 protein | Af (S/2, 3) | AI948598 | XM_059607 |
| KIAA0493 | Af (S/2, 3) | AA532655 | AB007962 (28) |
| hypothetical protein MGC2780 | Af (S/2, 3) | AI734962 | NM_025266 (29) |
| transmembrane protein 2 | Af (NS/2, 3) | NM_013390 | 57094_at |
| Novel human gene mapping to | Af (S/2, 2) | AA651889 | HS455J72 (30) |
| chomosome 1 | | | |

*Af = Affymetrix, S = specific for LEC, NS = nonspecific (also expressed in BEC), numbers represent log2 ratio of the signal intensities between BEC and LEC

[0265] In Tables 5, 6 and 12, the numbers in parentheses refer to the SEQ ID NO: in the Sequence Listing. Table 13 below correlates these sequences with polypeptide sequences SEQ ID NO:31-44 and 46 (Open reading frames, ORF's).

TABLE 13
Polypeptides corresponding to LEC-specific polynucleotides

| Accession number | Polynucleotide | Polypeptide |
|---|---|---|
| NM_021647 | SEQ ID NO: 14 | SEQ ID NO: 31 |
| NM_014817 | SEQ ID NO: 15 | SEQ ID NO: 32 |
| XM_059074 | SEQ ID NO: 16 | SEQ ID NO: 33 |
| NM_016647 | SEQ ID NO: 17 | SEQ ID NO: 34 |
| XM_048721 | SEQ ID NO: 20 | SEQ ID NO: 35 |
| XM_047649 | SEQ ID NO: 21 | SEQ ID NO: 36 |
| XM_030300 | SEQ ID NO: 22 | SEQ ID NO: 37 |
| NM_052862 | SEQ ID NO: 23 | SEQ ID NO: 38 |
| XM_039314 | SEQ ID NO: 24 | SEQ ID NO: 39 |
| AB028981 | SEQ ID NO: 25 | SEQ ID NO: 40 |
| XM_059607 | SEQ ID NO: 26 | SEQ ID NO: 41 |
| XM_058449 | SEQ ID NO: 27 | SEQ ID NO: 42 |
| NM_025266 | SEQ ID NO: 29 | SEQ ID NO: 43 |
| AL137762/HS455J72 | SEQ ID NO: 30 | SEQ ID NO: 44 |
| XM_084655 | SEQ ID NO: 45 | SEQ ID NO: 46 |

[0266] TABLE 14
Sequence identifiers for sequences in Table 3

| | accession | | | |
|---|---|---|---|---|
| | numbers | | aa SEQ ID NO: | nt SEQ ID NO: |
| lung type-I cell membrane-associated protein, | AF030428 | NM_006474 | SEQ ID NO: 65 | SEQ ID NO: 66 |
| podoplanin | | | | |
| lung type-I cell membrane-associated protein, | AI660929 | NM_006474 | duplicate | |
| podoplanin | | | | |
| cellular retinol-binding protein | M11433 | NM_002899 | SEQ ID NO: 67 | SEQ ID NO: 68 |
| macrophage mannose receptor (MRC1) | M93221 | | SEQ ID NO: 69 | SEQ ID NO: 70 |
| transcription factor C-MAF | AF055376 | NM_005360 | SEQ ID NO: 71 | SEQ ID NO: 72 |
| transcription factor C-MAF | AF055376 | NM_005360 | duplicate | |
| selenoprotein P | Z11793 | NM_005410 | SEQ ID NO: 73 | SEQ ID NO: 74 |
| KIAA0466, immunoglobulin superfamily, | AB007935 | NM_001542 | SEQ ID NO: 75 | SEQ ID NO: 76 |
| member 3 | | | | |
| type II membrane protein similar to HIV gp120- | AB015629 | NM_014257 | SEQ ID NO: 77 | SEQ ID NO: 78 |
| binding C-type lectin, CD209 antigen-like | | | | |
| KIAA0626 | AB014526 | NM_021647 | SEQ ID NO: 79 | SEQ ID NO: 80 |
| KIAA0711 | AB018254 | NM_014867 | SEQ ID NO: 81 | SEQ ID NO: 82 |
| integrin alpha 9 | D25303 | NM_002207 | SEQ ID NO: 83 | SEQ ID NO: 84 |
| integrin alpha 9 | D25303 | NM_002207 | duplicate | |
| relaxin H2 | X00948 | NM_005059 | SEQ ID NO: 85 | SEQ ID NO: 86 |
| KIAA0644 | AB014544 | NM_014817 | SEQ ID NO: 87 | SEQ ID NO: 88 |
| Cdk-inhibitor p57KIP2 (KIP2) | U22398 | NM_000076 | SEQ ID NO: 89 | SEQ ID NO: 90 |
| Cdk-inhibitor p57KIP2 (KIP2) | U22398 | NM_000076 | duplicate | |
| transient receptor potential channel TRPC6 | AJ006276 | NM_004621 | SEQ ID NO: 91 | SEQ ID NO: 92 |
| cDNA DKFZp564O222 (from clone | AL050002 | | | SEQ ID NO: 93 |
| DKFZp564O222) | | | | |
| | M80482 | NM_002570 | SEQ ID NO: 94 | SEQ ID NO: 95 |
| regulator of G-protein signalling 16, A28-RGS14p | U70426 | NM_002928 | SEQ ID NO: 96 | SEQ ID NO: 97 |
| dihydropyrimidinase related protein-1, collapsin | D78012 | NM_001313 | SEQ ID NO: 98 | SEQ ID NO: 99 |
| response mediator protein 1 | | | | |
| desmoplakin (DPI, DPII) | AL031058 | NM_004415 | SEQ ID NO: 100 | SEQ ID NO: 101 |
| pendrin, solute carrier family, member 4 | AF030880 | NM_000441 | SEQ ID NO: 102 | SEQ ID NO: 103 |
| reelin (RELN) | U79716 | NM_005045 | SEQ ID NO: 104 | SEQ ID NO: 105 |
| integrin, alpha 1 | X68742 | | | SEQ ID NO: 106 |
| integrin alpha 1 | X68742 | | duplicate | |
| cholesterol 25-hydroxylase | AF059214 | NM_003956 | SEQ ID NO: 107 | SEQ ID NO: 108 |
| inhibin beta-B-subunit precursor | M31682 | NM_002193 | SEQ ID NO: 109 | SEQ ID NO: 110 |
| KIAA1233 | AL109724 | | | |
| pre-B cell stimulating factor homologue (SDF1b) | L36033 | NM_000609 | SEQ ID NO: 112 | SEQ ID NO: 113 |
| V-Erba Related Ear-3 Protein | HG3510-HT3704 | | | SEQ ID NO: 114 |
| antigen identified by monoclonal antibody MRC | X05323 | | SEQ ID NO: 115 | SEQ ID NO: 116 |
| OX-2 | | | | |
| apolipoprotein D | J02611 | NM_001647 | SEQ ID NO: 117 | SEQ ID NO: 118 |
| TIMP3, tissue inhibitor of matrix | U14394 | NM_000362 | SEQ ID NO: 119 | SEQ ID NO: 120 |
| metalloproteinases | | | | |
| TIMP3 | U14394 | NM_000362 | duplicate | |
| aldehyde dehydrogenase 1 | K03000 | NM_000689 | SEQ ID NO: 121 | SEQ ID NO: 122 |
| prospero-related homeobox 1 (prox 1) | U44060 | NM_002763 | SEQ ID NO: 123 | SEQ ID NO: 124 |
| matrix Gla protein | AI953789 | NM_000900 | SEQ ID NO: 125 | SEQ ID NO: 126 |
| neuronal pentraxin II (NPTX2) | U29195 | | SEQ ID NO: 127 | SEQ ID NO: 128 |
| histatin 2 (HIS2) | M26665 | NM_000200 | SEQ ID NO: 129 | SEQ ID NO: 130 |
| ADDL mRNA for adducin-like protein, adducin 3 | D67031 | NM_016824 | SEQ ID NO: 131 | SEQ ID NO: 132 |
| (gamma) | | | | |
| adducin 3 (gamma) | U37122 | NM_016824 | duplicate | |
| MADS box transcription enhancer factor 2, | L08895 | NM_002397 | SEQ ID NO: 133 | SEQ ID NO: 134 |
| polypeptide C (myocyte enhancer factor 2C) | | | | |
| MADS box transcription enhancer factor 2, | | NM_002397 | duplicate | |
| (myocyte enhancer factor 2C) | | | | |
| MADS box transcription enhancer factor 2, | S57212 | NM_002397 | duplicate | |
| polypeptide C (myocyte enhancer factor 2C) | | | | |
| phosphoglucomutase 5 | L40933 | NM_021965 | SEQ ID NO: 135 | SEQ ID NO: 136 |
| cyclin E2 | AF102778 | NM_004702 | SEQ ID NO: 137 | SEQ ID NO: 138 |
| interleukin 7 (IL7) | M29053 | | SEQ ID NO: 139 | SEQ ID NO: 140 |
| interleukin 7 | J04156 | NM_000880 | duplicate | |
| cDNA DKFZp586L0120 (from clone | AL050154 | | | SEQ ID NO: 141 |
| DKFZp586L0120) | | | | |
| peroxisome proliferative activated receptor, | L40904 | NM_005037 | SEQ ID NO: 142 | SEQ ID NO: 143 |
| gamma, PPARG | | | | |
| fatty acid binding protein 4 | AA128249 | NM_001442 | SEQ ID NO: 144 | SEQ ID NO: 145 |
| protein kinase C zeta | Z15108 | NM_002744 | SEQ ID NO: 146 | SEQ ID NO: 147 |
| 46 kDa coxsackievirus and adenovirus receptor | Y07593 | NM_001338 | SEQ ID NO: 148 | SEQ ID NO: 149 |
| (CAR) protein | | | | |
| PAC clone RP4-751H13 from 7q35-qter, zinc | AC004877 | | SEQ ID NO: 150 | SEQ ID NO: 151 |
| finger-like | | | | |
| thymidine kinase 1, soluble | M15205 | NM_003258 | SEQ ID NO: 152 | SEQ ID NO: 153 |
| thymidine kinase 1 | K02581 | NM_003258 | duplicate | |
| Pig7 (PIG7), LPS-induced TNF-alpha factor | AF010312 | NM_004862 | SEQ ID NO: 154 | SEQ ID NO: 155 |
| LPS-induced TNF-alpha factor | AL120815 | NM_004862 | duplicate | |
| lipase A, lysosomal acid, cholesterol esterase | X76488 | NM_000235 | SEQ ID NO: 156 | SEQ ID NO: 157 |
| ubiquitin specific protease 13 (isopeptidase T-3) | U75362 | NM_003940 | SEQ ID NO: 158 | SEQ ID NO: 159 |
| carcinoembryonic antigen-related cell adhesion | X16354 | NM_001712 | SEQ ID NO: 160 | SEQ ID NO: 161 |
| molecule 1 (biliary glycoprotein) CEACAM1 | | | | |
| cDNA DKFZp586D0918 (from clone | AL049370 | | | SEQ ID NO: 162 |
| DKFZp586D0918) | | | | |
| KIAA0598, B cell RAG associated protein | AB011170 | NM_014863 | SEQ ID NO: 163 | SEQ ID NO: 164 |
| RAMP2 (receptor (calcitonin) activity modifying | AJ001015 | NM_005854 | SEQ ID NO: 165 | SEQ ID NO: 166 |
| protein 2) | | | | |
| cholesteryl ester transfer protein precursor | M30185 | NM_000078 | SEQ ID NO: 167 | SEQ ID NO: 168 |
| epithelial membrane protein 2 | U52100 | NM_001424 | SEQ ID NO: 169 | SEQ ID NO: 170 |
| MHC class II lymphocyte antigen (HLA-DP) beta | M83664 | NM_002121 | SEQ ID NO: 171 | SEQ ID NO: 172 |
| chain | | | | |
| MHC class II lymphocyte antigen (HLA-DP) beta | M83664 | NM_002121 | duplicate | |
| chain | | | | |
| beta-arrestin 2 | AF106941 | NM_004313 | SEQ ID NO: 173 | SEQ ID NO: 174 |
| mitotic checkpoint kinase Bub1 (BUB1) | AF053305 | NM_004336 | SEQ ID NO: 175 | SEQ ID NO: 176 |
| KIAA0229, similar to human ankyrin 1(S08275) | D86982 | | SEQ ID NO: 177 | SEQ ID NO: 178 |
| Sprouty 1 homolog (antagonist of FGF signaling) | AF041037 | | SEQ ID NO: 179 | SEQ ID NO: 180 |
| guanine nucleotide exchange factor for Rap1; M- | | NM_012294 | SEQ ID NO: 181 | SEQ ID NO: 182 |
| Ras-regulated GEF, KIAA0277 | | | | |
| translin | X78627 | NM_004622 | SEQ ID NO: 183 | SEQ ID NO: 184 |
| erythrocyte membrane protein band 4.9 (dematin) | U28389 | NM_001978 | SEQ ID NO: 185 | SEQ ID NO: 186 |
| KIAA0846 protein | AB020653 | NM_015376 | SEQ ID NO: 187 | SEQ ID NO: 188 |
| glia maturation factor, gamma | W07033 | NM_004877 | SEQ ID NO: 189 | SEQ ID NO: 190 |
| insulin-like growth factor binding protein 2 | X16302 | NM_000597 | SEQ ID NO: 191 | SEQ ID NO: 192 |
| (IGFBP-2) | | | | |
| smooth muscle myosin heavy chain isoform | S67247 | | SEQ ID NO: 193 | SEQ ID NO: 194 |
| Smemb | | | | |
| TTG-2 (cysteine rich protein with LIM motif), | X61118 | NM_005574 | SEQ ID NO: 195 | SEQ ID NO: 196 |
| LIM domain only 2 (rhombotin-like 1) | | | | |
| cyclin B2 | AL080146 | NM_004701 | SEQ ID NO: 197 | SEQ ID NO: 198 |
| KIAA0353 | AB002351 | | SEQ ID NO: 199 | SEQ ID NO: 200 |
| KIAA0559, piccolo (presynaptic cytomatrix | AB011131 | | SEQ ID NO: 201 | SEQ ID NO: 202 |
| G protein-coupled receptor, family C, group 5, | AC004131 | NM_016235 | SEQ ID NO: 203 | SEQ ID NO: 204 |
| G protein-coupled receptor, family C, group 5, | AI801872 | NM_016235 | duplicate | dup |
| member B | | | | |
| CREM (cyclic AMP-responsive element | S68134 | NM_001881 | SEQ ID NO: 205 | SEQ ID NO: 206 |
| modulator beta isoform) | | | | |
| CREM (cyclic AMP-responsive element | S68134 | NM_001881 | duplicate | dup |
| modulator beta isoform) | | | | |
| CREM (cyclic AMP-responsive element | S68271 | NM_001881 | duplicate | dup |
| modulator beta isoform) | | | | |
| hypothetical protein FLJ13110 | AL080222 | NM_022912 | SEQ ID NO: 207 | SEQ ID NO: 208 |
| inositol(myo)-1(or 4)-monophosphatase 2 | AF014398 | NM_014214 | SEQ ID NO: 209 | SEQ ID NO: 210 |
| KIAA0937 protein | AB023154 | | SEQ ID NO: 211 | SEQ ID NO: 212 |
| mitotic spindle coiled-coil related protein | AF063308 | NM_006461 | SEQ ID NO: 213 | SEQ ID NO: 214 |
| cysteine and glycine-rich protein 2 (CSRP2) | U57646 | NM_001321 | SEQ ID NO: 215 | SEQ ID NO: 216 |
| topoisomerase (DNA) II alpha (170 kD) | AI375913 | NM_001067 | SEQ ID NO: 217 | SEQ ID NO: 218 |
| DNA topoisomerase II | J04088 | NM_001067 | duplicate | dup |
| protein phosphatase inhibitor 2 (PPP1R2) | U68111 | | SEQ ID NO: 219 | SEQ ID NO: 220 |
| KIAA0186 | D80008 | NM_021067 | SEQ ID NO: 221 | SEQ ID NO: 222 |
| dual-specificity tyrosine-(Y)-phosphorylation | Y12735 | NM_003582 | SEQ ID NO: 223 | SEQ ID NO: 224 |
| regulated kinase 3 (Dyrk3) | | | | |
| kinesin-like spindle protein HKSP (HKSP) | U37426 | NM_004523 | SEQ ID NO: 225 | SEQ ID NO: 226 |
| huntingtin-associated protein interacting protein | U94190 | NM_003947 | SEQ ID NO: 227 | SEQ ID NO: 228 |
| (duo) | | | | |
| diubiquitin | AL031983 | NM_006398 | SEQ ID NO: 229 | SEQ ID NO: 230 |
| bikunin, serine protease inhibitor, Kunitz type, 2 | U78095 | NM_021102 | SEQ ID NO: 231 | SEQ ID NO: 232 |
| cytochrome P-450-1 (TCDD-inducible) | K03191 | NM_000499 | SEQ ID NO: 233 | SEQ ID NO: 234 |
| cytochrome P(1)-450 | X02612 | NM_000499 | duplicate | dup |
| KIAA0513 | | NM_014732 | SEQ ID NO: 235 | SEQ ID NO: 236 |
| protein phosphatase inhibitor 2 (PPP1R2) | U68111 | | duplicate | |
| RAMP3 (receptor (calcitonin) activity modifying | AJ001016 | NM_005856 | SEQ ID NO: 237 | SEQ ID NO: 238 |
| protein 3) | | | | |
| B-myb | X13293 | NM_002466 | SEQ ID NO: 239 | SEQ ID NO: 240 |
| KIAA0952 | AB023169 | NM_014962 | SEQ ID NO: 241 | SEQ ID NO: 242 |
| interferon stimulated gene (20 kD), HEM45 | U88964 | NM_002201 | SEQ ID NO: 243 | SEQ ID NO: 244 |
| GS3955 | D87119 | NM_021643 | SEQ ID NO: 245 | SEQ ID NO: 246 |
| GS3955 | D87119 | NM_021643 | duplicate | dup |
| GRB2-related adaptor protein (Grap) | U52518 | NM_006613 | SEQ ID NO: 247 | SEQ ID NO: 248 |
| KIAA1071 protein | AB028994 | | SEQ ID NO: 249 | SEQ ID NO: 250 |
| RNA-binding protein gene with multiple splicing, | D84111 | NM_006867 | SEQ ID NO: 251 | SEQ ID NO: 252 |
| RBP-MS/type 5 | | | | |
| RNA-binding protein gene with multiple splicing, | D84111 | NM_006867 | duplicate | dup |
| RBP-MS/type 5 | | | | |
| RBP-MS/type 4, RNA-binding protein gene with | D84110 | NM_006867 | duplicate | |
| multiple splicing | | | | |
| RBP-MS/type 4, RNA-binding protein gene with | D84110 | NM_006867 | duplicate | dup |
| multiple splicing | | | | |
| RBP-MS/type 3, RNA-binding protein gene with | D84109 | NM_006867 | duplicate | dup |
| multiple splicing | | | | |
| alpha-actinin-2-associated LIM protein | AF002282 | NM_014476 | SEQ ID NO: 253 | SEQ ID NO: 254 |
| semaphorin-III (Hsema-I), semaphorin 3A | L26081 | NM_006080 | SEQ ID NO: 255 | SEQ ID NO: 256 |
| IQ motif containing GTPase activating protein 2 | U51903 | NM_006633 | SEQ ID NO: 257 | SEQ ID NO: 258 |
| Arrestin, Beta 2 | HG2059-HT2114 | | duplicate | |
| retinoblastoma-associated protein HEC | AF017790 | NM_006101 | SEQ ID NO: 259 | SEQ ID NO: 260 |
| LIM domain binding protein (LDB1) | AF052389 | NM_001290 | SEQ ID NO: 261 | SEQ ID NO: 262 |
| dual specificity phosphatase 5 | U15932 | NM_004419 | SEQ ID NO: 263 | SEQ ID NO: 264 |
| Homo sapiens cDNA 3′, mRNA sequence | AI557322 | | | SEQ ID NO: 265 |
| monoamine oxidase A (MAOA) | M68840 | NM_000240 | SEQ ID NO: 266 | SEQ ID NO: 267 |
| monoamine oxidase A | AA420624 | NM_000240 | duplicate | |
| NECDIN related protein | U35139 | NM_002487 | SEQ ID NO: 268 | SEQ ID NO: 269 |
| regulatory solute carrier protein, family 1, | X82877 | NM_006511 | SEQ ID NO: 270 | SEQ ID NO: 271 |
| member 1 | | | | |
| TTK protein kinase | M86699 | NM_003318 | SEQ ID NO: 272 | SEQ ID NO: 273 |
| fms-related tyrosine kinase 4, VEGFR-3 | X69878 | NM_002020 | SEQ ID NO: 274 | SEQ ID NO: 275 |
| TSC403, similar to lysosome-associated | AB013924 | NM_014398 | SEQ ID NO: 276 | SEQ ID NO: 277 |
| membrane glycoprotein | | | | |
| HMG-2 | X62534 | | SEQ ID NO: 278 | SEQ ID NO: 279 |
| Homo sapiens clone 24416 mRNA sequence | AF052159 | | SEQ ID NO: 280 | SEQ ID NO: 281 |
| calcitonin receptor-like | L76380 | NM_005795 | SEQ ID NO: 282 | SEQ ID NO: 283 |
| KIAA0582 protein | AI761647 | NM_015147 | SEQ ID NO: 284 | SEQ ID NO: 285 |
| cDNA DKFZp434B102 (from clone | AL080192 | | | SEQ ID NO: 286 |
| DKFZp434B102) | | | | |
| cDNA DKFZp586G1922 (from clone | AL080110 | | SEQ ID NO: 287 | SEQ ID NO: 287 |
| DKFZp586G1922) | | | | |
| Acyl-CoA synthetase 3 | D89053 | NM_004457 | SEQ ID NO: 288 | SEQ ID NO: 289 |
| fatty-acid-Coenzyme A ligase, long-chain 3 | AA977580 | NM_004457 | duplicate | |
| STAT induced STAT inhibitor-2 | AF037989 | | SEQ ID NO: 290 | SEQ ID NO: 291 |
| Homeotic Protein Hox5.4 | HG3502-HT3696 | | | SEQ ID NO: 292 |
| hypothetical protein FLJ13910, cDNA | AL050139 | NM_022780 | SEQ ID NO: 293 | SEQ ID NO: 294 |
| DKFZp586M141 (from clone DKFZp586M141) | | | | |
| cDNA DKFZp586N012 (from clone | AL049471 | | | SEQ ID NO: 295 |
| DKFZp586N012) | | | | |
| UbcH10, ubiquitin carrier protein E2-C | U73379 | NM_007019 | SEQ ID NO: 296 | SEQ ID NO: 297 |
| cyclin-dependent kinase inhibitor 3, protein | L25876 | NM_005192 | SEQ ID NO: 298 | SEQ ID NO: 299 |
| tyrosine phosphatase (CIP2) | | | | |
| glycogen phosphorylase (PYGL) | AF046798 | | SEQ ID NO: 300 | SEQ ID NO: 301 |
| Angiopoietin-2 | AF004327 | NM_001147 | SEQ ID NO: 302 | SEQ ID NO: 303 |
| Angiopoietin-2 | AF004327 | NM_001147 | duplicate | dup |
| forkhead box M1 | U74612 | NM_021953 | SEQ ID NO: 304 | SEQ ID NO: 305 |
| potentially prenylated protein tyrosine | AF041434 | NM_007079 | SEQ ID NO: 306 | SEQ ID NO: 307 |
| phosphatase hPRL-3 | | | | |
| RAB31, Low Mr GTP-binding protein of the Rab | U59877 | NM_006868 | SEQ ID NO: 308 | SEQ ID NO: 309 |
| subfamily | | | | |
| RAB31, member RAS oncogene family | AI189226 | NM_006868 | | |
| myosin VIIA | U39226 | NM_000260 | SEQ ID NO: 310 | SEQ ID NO: 311 |
| Grb2-associated binder-1, docking protein related | U43885 | NM_002039 | SEQ ID NO: 312 | SEQ ID NO: 313 |
| to IRS-1 | | | | |
| lamin B1 | L37747 | | SEQ ID NO: 314 | SEQ ID NO: 315 |
| minichromosome maintenance deficient (mis5, S. pombe) | D84557 | NM_005915 | SEQ ID NO: 316 | SEQ ID NO: 317 |
| 6 HsMcm6 | | | | |
| cyclin B1 | M25753 | | | SEQ ID NO: 318 |
| cyclin B1 | M25753 | | duplicate | dup |
| RTP, N-myc downstream regulated | D87953 | NM_006096 | SEQ ID NO: 319 | SEQ ID NO: 320 |
| alpha2,3-sialyltransferase | AB022918 | NM_006100 | SEQ ID NO: 321 | SEQ ID NO: 322 |
| ADP-ribosylation factor-like protein 4 | U73960 | NM_005738 | SEQ ID NO: 323 | SEQ ID NO: 324 |
| centromere protein F (350/400 kD, mitosin) | U30872 | NM_016343 | SEQ ID NO: 325 | SEQ ID NO: 326 |
| paternally expressed 10, KIAA1051 | AB028974 | NM_015068 | SEQ ID NO: 327 | SEQ ID NO: 328 |
| tubulin, alpha 1 (testis specific) | X06956 | | SEQ ID NO: 329 | SEQ ID NO: 330 |
| KIAA0101 | D14657 | NM_014736 | SEQ ID NO: 331 | SEQ ID NO: 332 |
| KIAA0128, septin 2 | D50918 | | SEQ ID NO: 333 | SEQ ID NO: 334 |
| protein phosphatase 2, regulatory subunit B (B56), | Z69030 | NM_002719 | SEQ ID NO: 335 | SEQ ID NO: 336 |
| gamma | | | | |
| deoxycytidine kinase | M60527 | NM_000788 | SEQ ID NO: 337 | SEQ ID NO: 338 |
| integrin beta 3 binding protein (beta3-endonexin) | U37139 | NM_014288 | SEQ ID NO: 339 | SEQ ID NO: 340 |
| TAL1 (SCL) interrupting locus | M74558 | NM_003035 | SEQ ID NO: 341 | SEQ ID NO: 342 |
| KIAA0666 | AB014566 | | SEQ ID NO: 343 | SEQ ID NO: 344 |
| cAMP-specific phosphodiesterase 8A, PDE8A1 | AF056490 | | SEQ ID NO: 345 | SEQ ID NO: 346 |
| mitotic checkpoint kinase Mad3L (MAD3L), | AF053306 | NM_001211 | SEQ ID NO: 347 | SEQ ID NO: 348 |
| BUB1B | | | | |
| ribosomal S6 kinase | X85106 | NM_021135 | SEQ ID NO: 349 | SEQ ID NO: 350 |
| HPTP epsilon (protein tyrosine phosphatase | X54134 | NM_006504 | SEQ ID NO: 351 | SEQ ID NO: 352 |
| epsilon) | | | | |
| Lyn tyrosine kinase, v-yes-1 Yamaguchi sarcoma | M79321 | NM_002350 | SEQ ID NO: 353 | SEQ ID NO: 354 |
| viral related oncogene homolog | | | | |
| lyn tyrosine kinase, v-yes-1 Yamaguchi sarcoma | M16038 | NM_002350 | duplicate | |
| viral related oncogene homolog | | | | |
| lyn tyrosine kinase | M16038 | NM_002350 | duplicate | |
| brachyury variant A (TBX1), T-box 1 | AF012130 | NM_005992 | SEQ ID NO: 355 | SEQ ID NO: 356 |
| transcription factor | | | | |
| mki67a mRNA (long type) for antigen of | X65550 | NM_002417 | SEQ ID NO: 357 | SEQ ID NO: 358 |
| monoclonal antibody Ki-67 | | | | |
| protein tyrosine phosphatase receptor pi (PTPRP) | U81561 | NM_002847 | SEQ ID NO: 359 | SEQ ID NO: 360 |
| cb1-b | U26710 | NM_004351 | SEQ ID NO: 361 | SEQ ID NO: 362 |
| Cyclin A2 | X51688 | NM_001237 | SEQ ID NO: 363 | SEQ ID NO: 364 |
| nucleoside phosphorylase | X00737 | NM_000270 | SEQ ID NO: 365 | SEQ ID NO: 366 |
| TNF-related apoptosis inducing ligand TRAIL | U37518 | NM_003810 | SEQ ID NO: 367 | SEQ ID NO: 368 |
| phosphodiesterase 4B, cAMP-specific | L20971 | NM_002600 | SEQ ID NO: 369 | SEQ ID NO: 370 |
| nidogen (enactin) | M30269 | NM_002508 | SEQ ID NO: 371 | SEQ ID NO: 372 |
| HYA22 protein | D88153 | NM_005808 | SEQ ID NO: 373 | SEQ ID NO: 374 |
| phosphatidic acid phosphatase type 2A | AF014402 | NM_003711 | SEQ ID NO: 375 | SEQ ID NO: 376 |
| KIAA0512, ALEX2 | AB011084 | NM_014782 | SEQ ID NO: 377 | SEQ ID NO: 378 |
| thromboxane A2 receptor | D38081 | NM_001060 | SEQ ID NO: 379 | SEQ ID NO: 380 |
| trefoil factor 3 (intestinal) | AI985964 | NM_003226 | SEQ ID NO: 381 | SEQ ID NO: 382 |
| G-2 and S-phase expressed 1 | AL031588 | NM_016426 | SEQ ID NO: 383 | SEQ ID NO: 384 |
| ADP-ribosyltransferase (NAD+; poly (ADP- | AJ236876 | NM_005484 | SEQ ID NO: 385 | SEQ ID NO: 386 |
| ribose) polymerase)-like 2 | | | | |
| serine/threonine kinase 12 | AF015254 | NM_004217 | SEQ ID NO: 387 | SEQ ID NO: 388 |
| Tubulin, Alpha 1, Isoform 44 | HG2259-HT2348 | | duplicate | |
| lamin B receptor | L25931 | NM_002296 | SEQ ID NO: 389 | SEQ ID NO: 390 |
| KIAA0429 | AB007889 | NM_014751 | SEQ ID NO: 391 | SEQ ID NO: 392 |
| transcription factor 4 | M74719 | NM_003199 | SEQ ID NO: 393 | SEQ ID NO: 394 |
| syndecan 3 (N-syndecan), KIAA0468 | AB007937 | NM_014654 | SEQ ID NO: 395 | SEQ ID NO: 396 |
| RECK protein precursor | AA099265 | NM_021111 | SEQ ID NO: 397 | SEQ ID NO: 398 |
| Putative prostate cancer tumor suppressor | U42349 | NM_006765 | SEQ ID NO: 399 | SEQ ID NO: 400 |
| protein phosphatase 1, regulatory (inhibitor) | AB020630 | | SEQ ID NO: 401 | SEQ ID NO: 402 |
| subunit | | | | |
| PDZ and LIM domain 1 (elfin) | U90878 | NM_020992 | SEQ ID NO: 403 | SEQ ID NO: 404 |
| hypothetical protein from clone 643 | AF091087 | NM_020467 | SEQ ID NO: 405 | SEQ ID NO: 406 |
| p53-regulated DDA3 | AA926959 | | | SEQ ID NO: 407 |
| KIAA0062 | D31887 | | SEQ ID NO: 408 | SEQ ID NO: 409 |
| medium-chain acyl-CoA dehydrogenase | M91432 | | SEQ ID NO: 410 | SEQ ID NO: 411 |
| gap junction protein, alpha 1, 43 kD (connexin 43) | M65188 | NM_000165 | SEQ ID NO: 412 | SEQ ID NO: 413 |
| MyoD family inhibitor | U78313 | NM_005586 | SEQ ID NO: 414 | SEQ ID NO: 415 |
| endo/exonuclease Mre11 (MRE11A) | AF073362 | NM_005591 | SEQ ID NO: 416 | SEQ ID NO: 417 |
| nuclear receptor subfamily 2, group F, member 1 | X16155 | NM_005654 | SEQ ID NO: 418 | SEQ ID NO: 419 |

[0267] TABLE 15
Sequence identifiers for sequences in Table 4

| | accession | | aa SEQ ID | nt SEQ ID |
|---|---|---|---|---|
| | numbers | | NO: | NO: |
| p27 mRNA, interferon alpha- | X67325 | NM_005532 | 420 | 421 |
| inducible protein 27 | | | | |
| ribonuclease A (RNase A), | D26129 | NM_002933 | 422 | 423 |
| pancreatic | | | | |
| hematopoietic neural membrane | U87947 | NM_001425 | 424 | 425 |
| protein (HNMP-1) | | | | |
| N-cadherin | M34064 | NM_001792 | 426 | 427 |
| N-cadherin | M34064 | NM_001792 | duplicate | |
| interleukin 8 (IL8) | M28130 | NM_000584 | 428 | 429 |
| interleukin 8, beta-thromboglobulin- | M17017 | NM_000584 | 430 | 431 |
| like protein precursor | | | | |
| tyrosine kinase receptor (axl) | M76125 | NM_001699 | 432 | 433 |
| | HG162-HT3165 | | duplicate | |
| cell surface glycoprotein CD44 | L05424 | | 434 | 435 |
| (CD44) | | | | |
| cell adhesion molecule (CD44) | M59040 | NM_000610 | duplicate | |
| hyaluronate receptor (CD44) | L05424 | | duplicate | |
| vascular endothelial growth factor | U43142 | NM_005429 | 436 | 437 |
| related protein VRP, VEGF-C | | | | |
| Vascular endothelial growth factor C | X94216 | NM_005429 | duplicate | |
| collagen type XIII, alpha 1 | M33653 | NM_005203 | 438 | 439 |
| (=COL4A2) | | | | |
| collagen type XIII, alpha-1 | M59217 | NM_005203 | duplicate | |
| collagen alpha-2 type I | K01079 | | | 440 |
| collagen alpha-2 type I | K01079 | | duplicate | |
| collagen, type I, alpha 2 | V00503 | NM_000089 | duplicate | |
| proteoglycan 1 | X17042 | NM_002727 | 441 | 442 |
| phospholipase A2, group IV A, | M72393 | | 443 | 444 |
| calcium-dependent phospholipid- | | | | |
| binding protein (PLA2) | | | | |
| carbohydrate (keratan sulfate Gal-6) | AB003791 | NM_003654 | 445 | 446 |
| sulfotransferase | | | | |
| tropomyosin 2 (beta), fibroblast | M12125 | NM_003289 | 447 | 448 |
| tropomyosin | | | | |
| chondroitin sulfate proteoglycan 2 | X15998 | NM_004385 | 449 | 450 |
| (versican) | | | | |
| chondroitin sulfate proteoglycan 2 | X15998 | NM_004385 | duplicate | |
| (versican) | | | | |
| latent transforming growth factor- | Z37976 | NM_000428 | 451 | 452 |
| beta binding protein (LTBP-2) | | | | |
| interleukin 6 (interferon, beta 2) | X04430 | NM_000600 | 453 | 454 |
| bone morphogenetic protein-4 | U43842 | NM_001202 | 455 | 456 |
| (hBMP-4) | | | | |
| bone morphogenetic protein 2B, | M22490 | NM_001202 | duplicate | |
| BMP-4 | | | | |
| sarcolectin, keratin 7 | AJ238246 | NM_005556 | 457 | 458 |
| neuronal cell adhesion molecule, | AB002341 | NM_005010 | 459 | 460 |
| KIAA0343 | | | | |
| neuronal cell adhesion molecule, | U55258 | NM_005010 | duplicate | |
| hBRAVO/Nr-CAM precursor | | | | |
| matrix metalloproteinase 1 | M13509 | NM_002421 | 461 | 462 |
| (interstitial collagenase), skin | | | | |
| collagenase | | | | |
| stem cell factor, KIT ligand | M59964 | NM_000899 | 463 | 464 |
| uPA | X02419 | NM_002658 | 465 | 466 |
| plasminogen activator inhibitor-1 | J03764 | NM_000602 | 467 | 468 |
| plasminogen activator inhibitor 1 | M14083 | NM_000602 | duplicate | |
| selectin P, CD62, granule membrane | M25322 | NM_003005 | 469 | 470 |
| protein-140 (GMP-140) precursor | | | | |
| latrophilin-2 | AJ131581 | NM_012302 | 471 | 472 |
| actin, alpha 2 | X13839 | NM_001613 | 473 | 474 |
| fibroblast activation protein, alpha | U09278 | NM_004460 | 475 | 476 |
| regulator of G-protein signalling 20 | AF060877 | NM_003702 | 477 | 478 |
| IGF-II mRNA-binding protein 3 | U97188 | NM_006547 | 479 | 480 |
| retina cDNA randomly primed | W28438 | | | 481 |
| sublibrary, EST | | | | |
| brain acid-soluble protein 1, | AF039656 | NM_006317 | 482 | 483 |
| neuronal tissue-enriched acidic | | | | |
| protein (NAP-22) | | | | |
| profilin 2 | AL096719 | NM_002628 | 484 | 485 |
| profilin 2 | L10678 | NM_002628 | duplicate | |
| Na,K-ATPase beta-1 subunit | U16799 | NM_001677 | 486 | 487 |
| Claudin-7 | AJ011497 | NM_001307 | 488 | 489 |
| normal gingiva | U51712 | | | 490 |
| a disintegrin and metalloproteinase | AB009672 | NM_003812 | 491 | 492 |
| domain 23 | | | | |
| COL8A1 mRNA for alpha 1(VIII) | X57527 | NM_001850 | 493 | 494 |
| collagen | | | | |
| signal transducer and activator of | AF067575 | | 495 | 496 |
| transcription 6 (STAT6) | | | | |
| transcription factor IL-4 Stat, | U16031 | NM_003153 | duplicate | |
| STAT6 | | | | |
| lipocortin-III, annexin A3 | M20560 | NM_005139 | 497 | 498 |
| intercellular adhesion molecule 1 | M24283 | NM_000201 | 499 | 500 |
| (CD54), major group rhinovirus | | | | |
| receptor precusor | | | | |
| solute carrier family 1 | U08989 | NM_004170 | 501 | 502 |
| (neuronal/epithelial high affinity | | | | |
| glutamate transporter, system Xag) | | | | |
| solute carrier family 1 | AI928365 | NM_004170 | duplicate | |
| (neuronal/epithelial high affinity | | | | |
| glutamate transporter, system Xag) | | | | |
| p53 inducible protein | L47738 | | 503 | 504 |
| dihydropyrimidine dehydrogenase, | U20938 | NM_000110 | 505 | 506 |
| DPYD | | | | |
| natural killer cell transcript 4 | AA631972 | NM_004221 | 507 | 508 |
| PFTAIRE protein kinase 1, | AB020641 | NM_012395 | 509 | 510 |
| KIAA0834 | | | | |
| RGP4, regulator of G-protein | U27768 | NM_005613 | 511 | 512 |
| signalling 4 | | | | |
| regulator of G-protein signalling 4 | AI267373 | NM_005613 | duplicate | |
| Oncogene Amll-Evi-1, Fusion | HG4058-HT4328 | | 513 | 514 |
| Activated | | | | |
| Oncogene Amll-Evi-1, Fusion | HG4058-HT4328 | | duplicate | |
| Activated | | | | |
| adenylyl cyclase-associated protein 2 | N90755 | NM_006366 | 515 | 516 |
| clusterin (complement lysis | M25915 | NM_001831 | 517 | 518 |
| inhibitor, SP-40, 40, sulfated | | | | |
| glycoprotein 2, apolipoprotein J) | | | | |
| ADP ribosylation factor-like 7 | AB016811 | NM_005737 | 519 | 520 |
| H factor (complement)-like 1 | M65292 | NM_002113 | 521 | 522 |
| RNA helicase-related protein, | H68340 | NM_007372 | 523 | 524 |
| metallothionein-If | | | | |
| stimulated trans-acting factor (50 kDa) | X82200 | NM_006074 | 525 | 526 |
| Staf50 | | | | |
| cyclooxygenase-2 (hCox-2) | U04636 | NM_000963 | 527 | 528 |
| GRO1 oncogene, melanoma growth | X54489 | NM_001511 | 529 | 530 |
| stimulatory activity (MGSA) | | | | |
| NRGN, neurogranin | X99076 | NM_006176 | 531 | 532 |
| homologue of mouse dkk-1 | AB020315 | | 533 | 534 |
| gastrointestinal tumor-associated | J04152 | NM_002353 | 535 | 536 |
| antigen GA733-1, tumor-associated | | | | |
| calcium signal transducer 2 | | | | |
| laminin | Z15008 | NM_005562 | 537 | 538 |
| transgelin, 22 kDa smooth muscle | M95787 | NM_003186 | 539 | 540 |
| protein (SM22) | | | | |
| JE gene encoding a monocyte | M28225 | | 541 | 542 |
| secretory protein | | | | |
| zinc finger protein 238, RP58 | AJ223321 | NM_006352 | 543 | 544 |
| cathepsin C | X87212 | NM_001814 | 545 | 546 |
| tissue-type plasminogen activator (t- | M15518 | NM_000930 | 547 | 548 |
| PA) | | | | |
| sushi-repeat protein | AF060567 | NM_014467 | 549 | 550 |
| annexin A6 | D00510 | NM_001155 | 551 | 552 |
| EphrinB1 | U09303 | NM_004429 | 553 | 554 |
| EphrinB1 | U09303 | NM_004429 | duplicate | |
| TFEC isoform (transcription factor | D43945 | NM_012252 | 555 | 556 |
| EC) | | | | |
| small inducible cytokine A2, | M26683 | NM_002982 | 557 | 558 |
| (monocyte chemotactic protein1) | | | | |
| small inducible cytokine A2 | M26683 | NM_002982 | duplicate | |
| (monocyte chemotactic protein 1) | | | | |
| endothelial cell protein C/APC | L35545 | NM_006404 | 559 | 560 |
| receptor (EPCR) | | | | |
| transglutaminase 2 (TGase) | M55153 | NM_004613 | 561 | 562 |
| transglutaminase (TGase) | M55153 | NM_004613 | duplicate | |
| human metallothionein-If | M10943 | | 563 | 564 |
| transforming growth factor beta- | M77349 | NM_000358 | 565 | 566 |
| induced (BIGH3) | | | | |
| ENO2 gene for neuron specific | X51956 | | 567 | 568 |
| (gamma) enolase | | | | |
| FAT tumor suppressor (Drosophila) | X87241 | NM_005245 | 569 | 570 |
| homolog | | | | |
| malignant cell expression-enhanced | S82470 | NM_024298 | 571 | 572 |
| gene/tumor progression-enhanced | | | | |
| gene | | | | |
| malignant cell expression-enhanced | S82470 | NM_024298 | duplicate | 574 |
| gene/tumor progression-enhanced | | | | |
| gene | | | | |
| cDNA DKFZp566G0746 (from | AL050078 | | | 575 |
| clone DKFZp566G0746) | | | | |
| lysyl oxidase-like 2 | U89942 | NM_002318 | 576 | 577 |
| ras-related C3 botulinum toxin | M64595 | NM_002872 | 578 | 579 |
| substrate 2 (rho family, small GTP | | | | |
| binding protein Rac2) | | | | |
| endothelial leukocyte adhesion | M24736 | NM_000450 | 580 | 581 |
| molecule 1 (ELAM-1), selectin E | | | | |
| laminin, alpha 5, KIAA0533 | AB011105 | | 582 | 583 |
| placenta growth factor (PIGF) | X54936 | NM_002632 | 584 | 585 |
| ALL1-fused gene from chromosome | U16954 | NM_006818 | 586 | 587 |
| 1q, AF1q | | | | |
| stromelysin-2, MMP-10 | X07820 | NM_002425 | 588 | 589 |
| metallothionein-I-A | K01383 | | 590 | 591 |
| collagen VI alpha-1 | X15880 | | 592 | 593 |
| mad protein homolog (hMAD-3) | U68019 | NM_005902 | 594 | 595 |
| mad protein homolog (hMAD-3) | U68019 | NM_005902 | duplicate | |
| mad protein homolog (hMAD-3) | U68019 | NM_005902 | duplicate | |
| integral membrane protein 2A | AL021786 | | | 596 |
| interleukin 1 receptor-like 1 | D12763 | NM_003856 | 597 | 598 |
| high-mobility group (nonhistone | X92518 | | 599 | 600 |
| chromosomal) protein isoform I-C | | | | |
| (HMGI-C) | | | | |
| epidermal growth factor receptor | U12535 | NM_004447 | 601 | 602 |
| kinase substrate (Eps8) | | | | |
| lactate dehydrogenase B | X13794 | NM_002300 | 603 | 604 |
| mRNA for unknown product | D29810 | | 605 | 606 |
| hypothetical protein | AL033377 | | | 607 |
| DKFZp564D0462 | | | | |
| lysyl hydroxylase isoform 2 | U84573 | NM_000935 | 608 | 609 |
| (PLOD2) | | | | |
| follistatin-like 3, follistatin-related | U76702 | NM_005860 | 610 | 611 |
| protein (FLRG) | | | | |
| Homo sapiens clone 24674 mRNA | AF070578 | | | 612 |
| sequence | | | | |
| L-iditol-2 dehydrogenase | L29254 | | 613 | 614 |
| neuronal pentraxin 1 | U61849 | NM_002522 | 615 | 616 |
| hypothetical protein from clones | U90908 | NM_021226 | 617 | 618 |
| 23549 and 23762 | | | | |
| UDP-N-acetylglucosamine | AB011004 | NM_003115 | 619 | 620 |
| pyrophosphorylase | | | | |
| zinc finger protein 185 (LIM | Y09538 | NM_007150 | 621 | 622 |
| domain) | | | | |
| four and a half LIM domains 2, | U29332 | NM_001450 | 623 | 624 |
| heart protein (FHL-2) | | | | |
| mitogen-activated protein kinase- | U09578 | NM_004635 | 625 | 626 |
| activated protein kinase 3, | | | | |
| MAPKAP kinase (3pK) | | | | |
| metallothionein 1E (functional) | R92331 | | | 627 |
| TU3A protein | AF035283 | NM_007177 | 628 | 629 |
| metallothionein 1H | R93527 | NM_005951 | 630 | 631 |
| guanylate binding protein isoform II | M55543 | NM_004120 | 632 | 633 |
| (GBP-2) | | | | |
| soluble vascular endothelial cell | U01134 | NM_002019 | 634 | 635 |
| growth factor receptor 1 (sVEGFR- | | | | |
| 1) | | | | |
| R-Ras | M14949 | | 636 | 637 |
| R-ras | M14949 | | 638 | 639 |
| creatine transporter (SLC6A8), | U36341 | NM_005629 | 640 | 641 |
| solute carrier family 6, member 8 | | | | |
| target of myb1 (chicken) homolog, | Z82244 | NM_005488 | 642 | 643 |
| Heme Oxygenase 1 (HO-1) | | | | |
| procollagen-lysine, 2-oxoglutarate | L06419 | NM_000302 | 644 | 645 |
| 5-dioxygenase, lysyl hydroxylase | | | | |
| (PLOD) | | | | |
| KIAA0836 | AB020643 | | 646 | 647 |
| cDNA DKFZp434C171 (from clone | AL080169 | | 648 | 649 |
| DKFZp434C171) | | | | |
| IL-4-R mRNA for the interleukin 4 | X52425 | NM_000418 | 650 | 651 |
| receptor | | | | |
| chemokine (C—C motif) receptor- | AF014958 | NM_003965 | 652 | 653 |
| like 2 (CCRL2), chemokine receptor | | | | |
| X (CKRX) | | | | |
| phospholipase C, beta 3 | Z16411 | NM_000932 | 654 | 655 |
| (phosphatidylinositol-specific) | | | | |
| LIM domain protein | X93510 | NM_003687 | 656 | 657 |
| protein kinase (cAMP-dependent, | M34181 | NM_002731 | 658 | 659 |
| catalytic) inhibitor beta | | | | |
| rho GDP-dissociation Inhibitor 2 | X69549 | NM_001175 | 660 | 661 |
| KIAA0975, imidazoline receptor | AB023192 | NM_007184 | 662 | 663 |
| candidate | | | | |
| poliovirus receptor | X64116 | NM_006505 | 664 | 665 |
| poliovirus receptor | X64116 | NM_006505 | duplicate | |
| immediate early response 3 | S81914 | NM_003897 | 666 | 667 |
| metallothionein 2A | AI547258 | NM_005953 | 668 | 669 |
| tropomyosin 1 (alpha) | M19267 | NM_000366 | 670 | 671 |
| tropomyosin 1 (alpha) | Z24727 | NM_000366 | duplicate | |
| tropomyosin 1 (alpha) | M19267 | NM_000366 | duplicate | |
| TRAM-like protein | D31762 | NM_012288 | 672 | 673 |
| E3 ubiquitin ligase SMURF2 | AA630312 | NM_022739 | 674 | 675 |
| EGF-containing fibulin-like | U03877 | NM_004105 | 676 | 677 |
| extracellular matrix protein 1 | | | | |
| G protein-coupled receptor 56 | AJ011001 | NM_005682 | 678 | 679 |
| c-jun proto oncogene (JUN) | J04111 | NM_002228 | 680 | 681 |
| regulator of G-protein signalling 10, | AF045229 | NM_002925 | 682 | 683 |
| RGS10 | | | | |
| amyloid beta (A4) precursor | U62325 | | 684 | 685 |
| protein-binding, family B, member | | | | |
| 2 (Fe65-like) | | | | |
| ras-related rho protein | M12174 | NM_004040 | 686 | 687 |
| proteasome (prosome, macropain) | AL031177 | NM_002814 | 688 | 689 |
| 26S subunit, non-ATPase, 10 | | | | |
| KIAA0537 | AB011109 | NM_014840 | 690 | 691 |
| lysosome-associated membrane | X77196 | NM_002294 | 692 | 693 |
| protein-2 | | | | |
| phospholipid transfer protein | L26232 | NM_006227 | 694 | 695 |
| N-myristoyltransferase 2 | AF043325 | NM_004808 | 696 | 697 |
| phosphofructokinase (PFKM) | U24183 | NM_000289 | 698 | 699 |
| integrin, beta 4 | X53587 | NM_000213 | 700 | 701 |
| leupaxin | AF062075 | NM_004811 | 702 | 703 |
| endothelin-converting-enzyme 1 | Z35307 | NM_001397 | 704 | 705 |
| wild-type p53 activated fragment-1 | U03106 | NM_000389 | 706 | 707 |
| (WAF1), cyclin-dependent kinase | | | | |
| inhibitor 1A (p21, Cip1) | | | | |
| ICAM-2, cell adhesion ligand for | X15606 | NM_000873 | 708 | 709 |
| LFA-1 | | | | |
| ICAM-2, cell adhesion ligand for | X15606 | NM_000873 | duplicate | |
| LFA-1 | | | | |
| intercellular adhesion molecule 2 | M32334 | | 710 | 711 |
| (ICAM-2) | | | | |
| eukaryotic translation initiation | AF035280 | NM_014239 | 712 | 713 |
| factor 2B, eIF-2B beta subunit | | | | |
| uridine phosphorylase | X90858 | NM_003364 | 714 | 715 |
| integrin, beta 5 | X53002 | NM_002213 | 716 | 717 |
| N-sulfoglucosamine sulfohydrolase | U30894 | NM_000199 | 718 | 719 |
| (sulfamidase) | | | | |
| synaptojanin 2 | AF039945 | | 720 | 721 |
| metallothionein 1L | AA224832 | NM_002450 | 722 | 723 |
| macrophage capping protein, | M94345 | NM_001747 | 724 | 725 |
| gelsolin-like | | | | |
| HSPC022 protein | W68830 | NM_014029 | 726 | 727 |
| Human clone 137308 mRNA, | AW006742 | | no | 728 |
| partial cds | | | | |
| protocadherin 42, PC42, | L11370 | NM_002587 | 729 | 730 |
| protocadherin 1 (cadherin-like 1) | | | | |
| caspase-like apoptosis regulatory | AF005775 | NM_003879 | 731 | 732 |
| protein 2 (CLARP2) | | | | |
| caspase-like apoptosis regulatory | AF005775 | NM_003879 | duplicate | |
| protein 2 (CLARP2) | | | | |
| major vault protein, lrp | X79882 | NM_005115 | 733 | 734 |
| Fanconi anemia, complementation | AC004472 | NM_004629 | 735 | 736 |
| group G | | | | |
| prion protein (PrP) | U29185 | NM_000311 | 737 | 738 |
| interferon-stimulated protein, 15 kDa | AA203213 | NM_005101 | 739 | 740 |
| serine (or cysteine) proteinase | L40377 | NM_002640 | 741 | 742 |
| inhibitor, clade B (ovalbumin), | | | | |
| cytoplasmic antiproteinase 2 | | | | |
| (CAP2) | | | | |
| biglycan | J04599 | NM_001711 | 743 | 744 |
| chemokine (C—X—C motif), receptor | L06797 | NM_003467 | 745 | 746 |
| 4 (fusin) | | | | |
| ubiquitin carboxyl-terminal esterase | X04741 | NM_004181 | 747 | 748 |
| L1 (ubiquitin thiolesterase) | | | | |
| KIAA0469 | AB007938 | NM_014851 | 749 | 750 |
| TNF (ligand) superfamily, member | AL022310 | NM_003326 | 751 | 752 |
| 4 (tax-transcriptionally activated | | | | |
| glycoprotein 1, 34 kD) | | | | |
| KIAA1053 | AB028976 | | 753 | 754 |
| NAD(P)H-quinone oxireductase | M81600 | | 755 | 756 |
| sushi-repeat-containing protein | U61374 | NM_006307 | 757 | 758 |
| integrin, alpha 5 | X06256 | NM_002205 | 759 | 760 |
| enigma (LIM domain protein) | L35240 | NM_005451 | 761 | 762 |
| ectonucleoside triphosphate | AJ133133 | NM_001776 | 763 | 764 |
| diphosphohydrolase 1 | | | | |
| transforming growth factor-beta | M60315 | NM_001718 | 765 | 766 |
| (tgf-beta), bone morphogenetic | | | | |
| protein 6 | | | | |
| transforming growth factor-beta | M60315 | NM_001718 | duplicate | |
| (tgf-beta), bone morphogenetic | | | | |
| protein 6 | | | | |
| nicotinamide N-methyltransferase, | U08021 | NM_006169 | 767 | 768 |
| NNMT | | | | |
| cDNA DKFZp564J0323 (from | AL049957 | | no | 769 |
| clone DKFZp564J0323) | | | | |
| thioredoxin reductase beta | AB019694 | NM_006440 | 770 | 771 |
| f-box and leucine-rich repeat protein 2 | AL049953 | | 772 | 773 |
| transcobalamin II (TCN2) | L02648 | NM_000355 | 774 | 775 |
| aldehyde dehydrogenase 2, | X05409 | NM_000690 | 776 | 777 |
| mitochondrial | | | | |
| GTP-binding protein ragB | X90530 | NM_006064 | 778 | 779 |
| lymphocyte antigen 75 | AF011333 | NM_002349 | 780 | 781 |
| GM2 activator protein | X62078 | | 782 | 783 |
| type 3 inositol 1,4,5-trisphosphate | U01062 | NM_002224 | 784 | 785 |
| receptor (ITPR3) | | | | |
| KIAA0284 | AI828210 | | no | 786 |
| metallothionein I-B | M13485 | | 787 | 788 |
| BTG2 | U72649 | NM_006763 | 789 | 790 |
| adenylate kinase 1 | J04809 | NM_000476 | 791 | 792 |
| tumor necrosis factor receptor | Y09392 | NM_003790 | 793 | 794 |
| superfamily, member 12, WSL-LR, | | | | |
| WSL-S1 and WSL-S2 proteins | | | | |
| aminopeptidase N/CD13 | M22324 | NM_001150 | 795 | 796 |
| growth arrest and DNA-damage- | M60974 | NM_001924 | 797 | 798 |
| inducible protein (gadd45) | | | | |
| KIAA0638 protein | AB014538 | | 799 | 800 |
| vinculin | M33308 | NM_003373 | 801 | 802 |
| procollagen-proline, 2-oxoglutarate | U90441 | NM_004199 | 803 | 804 |
| 4-dioxygenase (proline 4- | | | | |
| hydroxlase), alpha polypeptide II | | | | |
| msg1-related gene 1 (mrg1), | U65093 | NM_006079 | 805 | 806 |
| Cbp/p300-interacting transactivator | | | | |
| microsomal glutathione S- | AF026977 | NM_004528 | 807 | 808 |
| transferase 3 | | | | |
| vitamin A responsive; cytoskeleton | AF070523 | NM_006407 | 809 | 810 |
| related | | | | |
| 17-kDa protein, interferon- | M13755 | NM_005101 | 811 | 812 |
| stimulated protein, 15 kDa | | | | |
| matrix metalloproteinase 14 | X83535 | NM_004995 | 813 | 814 |
| (membrane-inserted) | | | | |
| 4F2 cell-surface antigen, solute | J02939 | NM_002394 | 815 | 816 |
| carrier family 3, member 2 | | | | |
| metallothionein-III | M93311 | NM_005954 | 817 | 818 |
| protein kinase (cAMP-dependent, | S76965 | NM_006823 | 819 | 820 |
| catalytic) inhibitor alpha | | | | |
| protein kinase (cAMP-dependent, | S76965 | NM_006823 | duplicate | |
| catalytic) inhibitor alpha | | | | |
| reticulocalbin 1, EF-hand calcium | D42073 | NM_002901 | 821 | 822 |
| binding domain | | | | |
| lipin 1, KIAA0188 | D80010 | | 823 | 824 |
| protease, serine, 23 | AF015287 | NM_007173 | 825 | 826 |
| hect domain and RLD 2 | AF041080 | NM_004667 | 827 | 828 |
| GATA-binding protein (GATA2) | M68891 | NM_002050 | 829 | 830 |
| agrin precursor | AF016903 | | 831 | 832 |
| equilibrative nucleoside transporter | U81375 | NM_004955 | 833 | 834 |
| 1 (hENT1) | | | | |
| coronin, actin-binding protein 2B, | AB023142 | | 835 | 836 |
| KIAA0925 | | | | |
| f-box and WD-40 domain protein 3 | U07000 | NM_012165 | 837 | 838 |
| nonsyndromic hearing impairment | AF073308 | NM_004403 | 839 | 840 |
| protein (DFNA5) | | | | |
| actin filament associated protein | D25248 | NM_021638 | 841 | 842 |
| TNFR-related death receptor-6 | AF068868 | NM_014452 | 843 | 844 |
| (DR6) | | | | |
| serum/glucocorticoid regulated | Y10032 | NM_005627 | 845 | 846 |
| kinase | | | | |
| DNase X | X90392 | NM_006730 | 847 | 848 |
| DNase X | X90392 | NM_006730 | duplicate | |
| fatty acid desaturase 3 | AC004770 | NM_021727 | 849 | 850 |
| LYL-1 | M22637 | | 851 | 852 |
| ATP-binding cassette, sub-family C | X78338 | NM_004996 | 853 | 854 |
| (CFTR/MRP), member 1 | | | | |
| transmembrane protein (CD59) | M84349 | | 855 | 856 |
| fms-related tyrosine kinase 1, | S77812 | | 857 | 858 |
| VEGFR-1 | | | | |
| Hypothetical protein FLJ23403 | AI681538 | NM_022068 | 859 | 860 |
| hypothetical protein FLJ20898 | AI733570 | NM_024600 | 861 | 862 |

The application's sequence listing, which the Patent Office published only in electronic form, follows.

SEQUENCE LISTING (866 sequences)

SEQ ID NO: 1 - DNA, 786 bp, Homo sapiens
attgcacaatgctttaatattacacttgttatttttctcacactagtgagattttgataaacatagttgactttggaagtaacagagaatgttttcattggttaaataatttcaatgacctgtgaggaactgaaagcaagctattacattcatataaaagataagtacatatccataaattcacttggattcaatgaaaaataataaacttctcgtgtacttaataaaacttaaaaggaaacaaaattttaaatggtgcaaaaatagaatgtatttcttaaagttttgaaaacacttagacctaaaagaattctaagaatatctggccacattataagcctcttatttgtaaaagctaacacttgataattttaaaacaaaatctagattaaataaatatagttctgcattattaaagtaacaaaatctgtgatggtaaggtaaaatttccctaaataatataaacaaaaaacaacaccggaaagcaaatgtatcacgttatggcatcgataaacatttctgttcaaatgtgtggatctacagcattttctctaggtaacacacacagttgttatcacattagtatggaataaatgctgaaaaattaagaaatactaatggttactaggccaaagtcaattccaaaaaactcaattcttataaacttttattatagtgatttttactgtattacaacactttttttctctttttcctttgctttgtgattcatatttttagcagaggcatagcactggagataaagaaggggaaatatgcttcagg

SEQ ID NO: 2 - DNA, 534 bp, Homo sapiens
  misc_feature 437: n = A,T,C or G
  misc_feature 447: n = A,T,C or G
  misc_feature 453: n = A,T,C or G
  misc_feature 476: n = A,T,C or G
  misc_feature 495: n = A,T,C or G
gtttgagatgggagtctcgccatgttgtccacactggtctcaaactcctgggcttaaacaatccacctacctcagcctcccaagtgctaggattacaagtgtgagccactgtgcctggcccagtgtaattttaatctgcatttctctaagtgaagttaaacatttatgtatgtgtgtgtgtatatatatatctctttatatatatatctctttatatatatctttatatatatatatgctttttttttctttttctttttttgagacagggtccctctttgtcaggcaggctggagtgcagtggggtgaaaatggctcactgcagccttaacattaacatcttgggttcaagccatcctcccacctcagcctcccaagtagctgagaccacaggtgtgacccacacatatatatgtagaccacctttaaaaccttcnggaatggtcnggtcanggccctttgggcattttccaatnggggttttggacctttccncggttccgaatctgggccccgagggcaaaattccccaaa

SEQ ID NO: 3 - DNA, 673 bp, Homo sapiens
tttttttttttttttttttgatgagtaatgaattattttaacttttatttgattattttcatttacagttctggcactgacactttttttaaaaaaagattttaattttatgtaaagattgaacttcaataaaataacttaaaaaacatttacatgtatatcactaaatctccataaaatatacaatacttttgatacagcataggctaggatgactttgaaggaaatggtacatattcataatttttaagagatatcccatatatcgcttgtgggaataaatacttatattgaatttgccaagacatctgaagtattaaatactatataacatgcactcagaaattaaaatatacagtttgaaatacatatattttaaaagcataaaactgtgatttgatttaatctaggtatacattagagcttctaaatagaaatttgaatatttattacaaataaaagatactttaacatcaagtgatatatagtccaaaagctgctaggagacagtttggacgtgtagaatataaatttctactttggctagagttgtctcttcttttttaacctttaaatgagatggaataatgttgtttgctaaaactttaaaactttacaaaatgttggttactcattagcctgcatgatccacttctttttctcatttatgctg

SEQ ID NO: 4 - DNA, 531 bp, Homo sapiens
  misc_feature 422: n = A,T,C or G
  misc_feature 439: n = A,T,C or G
  misc_feature 451: n = A,T,C or G
  misc_feature 458: n = A,T,C or G
  misc_feature 469: n = A,T,C or G
  misc_feature 501: n = A,T,C or G
  misc_feature 511: n = A,T,C or G
tttttttttaaataaaagttaattttattgggaataatccctgtattgcattactcttttcagttaagaatttaaaagctgcccaatcgctgctggcccaaaagtctcgtcttatacaataacatgagagaaagggtgctgatccatcattattcactccacatgggaccataatggatttttctcttccaggtgattcagtttctctgagtttcatttgtttataagtagtactttaagacgtactgaaatttaacaaacagtaatggggacttggtatgagagccacttgaaaatattgcaatgggccgtttaaaattccgtctttaaattccttcagaaaagcactaagggaaaagtgacggacgtttttactttcatggcctggaattctggtcaaattaatatattgggattagggntaaggaggtttgtcccngtaggccaaaantaggatnttcccaggttnaataaccggaaagggcattccccctaaaaggntcccagggtnatttccgttggacagtacaa

SEQ ID NO: 5 - DNA, 469 bp, Homo sapiens
  misc_feature 453: n = A,T,C or G
ttaatgtttaactttttattaagaaactaaggcaaaacaacagaattccaaaaaataaagatacagaattctaatttaaattctaaacaaatataaaaatcagagtttaccagtatttttgagtagaggggagtggctaaatgcattcacagtaattatttcttccttaccagcctcaagtttgcaaccctttccttcctgcttcactgggactagaacagaatttctcattcatcttttgctactataatttttgcttctatagtctaaaacttcagaggagcttttgtctttctccgcagttctttctctgttccttcagcaaatatgtgagcacctgcctattgggcttacatgttgtggcacaaagatgagtccgttagagatcctgtcccagtttaggggcgatatgcaccaataaataatcaataaataattttaaacaaggtatanataaatacagcatgag

SEQ ID NO: 6 - DNA, 542 bp, Homo sapiens
ttttttttaaaagaaaaaaaaaatcacgtttattttacaaggcagttattttcctaaagtgttacatatcaaggaaagttgagctgtctgtaggaaaacaatataattttaggaaattacagaagagtcaacattgtgcttaaaactttaaaatagtttttaaaaatagcagagtaagtgaatattgccaggtatgaacagccttaaaaagtgaggtggacacaacgatatagaagctcaatattaaagccgctagtgataagtcgctttgagaagtgttcaggctactaagagaacactgcttcaaccttaatcgaaaaaagaagtcatagcactaactgaaacatggccttttcctagaacagctaactctcagttatctacagtaatgaaaaagagcagtgacaatttttaaatggtgaataattccaaaattaatgttgagaagtgccctatttctgtgttgatgtgagagacactgatatccgggaacttacagcactgaccacgtgtgtggaactcccactggcttcccccttctt

SEQ ID NO: 7 - DNA, 493 bp, Homo sapiens
gtatagaacagacactttattgcacactatggtgggggagagaggaagaggggtctagggtgacaatgcctcatcccctcccctgggctgagtggttttgacccagggctctgaccagccatgggacacatggacttgaattgttctgaacttatgccagaacccaaagtgacggcctggtgtgtatgcttgggtctgtataaagcagagctttcaatgagaagaggccctaggccccctcccccagccaaagtcatcgggccccagtgaagcagcagacctcacatctcagggcctatttgaaggatccagggatgctcagggagccaggttcattctaaccagtttagtttccagctcttttcacagtggggagtactctgggggagtggtgttggcccttgtgctttatatgctctttctcctcctcatcgcaatgcttcttcttctacctcgtatatttctcgtttttctcattctctcgcctctttct

SEQ ID NO: 8 - DNA, 512 bp, Homo sapiens
  misc_feature 59: n = A,T,C or G
  misc_feature 137: n = A,T,C or G
  misc_feature 172: n = A,T,C or G
  misc_feature 199: n = A,T,C or G
  misc_feature 232: n = A,T,C or G
  misc_feature 309: n = A,T,C or G
  misc_feature 337: n = A,T,C or G
  misc_feature 370: n = A,T,C or G
  misc_feature 403: n = A,T,C or G
  misc_feature 418: n = A,T,C or G
  misc_feature 453: n = A,T,C or G
  misc_feature 464: n = A,T,C or G
  misc_feature 471: n = A,T,C or G
  misc_feature 475: n = A,T,C or G
  misc_feature 497: n = A,T,C or G
  misc_feature 501..502: n = A,T,C or G
  misc_feature 505..507: n = A,T,C or G
  misc_feature 511: n = A,T,C or G
gtggatcccccgggctgcaggaattcggcacgaggtcctccaattccagcattcacagntgatgagcagtgcaggagcagggcgagaggaacagagccaatgatgtgtgggttacactgaggagccaaggacagggnctcaggtctcccccttacaaggagtgggtcatggnctgcattccagagaccaacatgatagnttttaattcagctgcatgacctgtgccttttangccataaagatacctcaagcctagcacctcttgaaatccagatgttcatattagactcgaaaaaataggctccaggnctaggtgcccaggctatgatgagtctgnttttggagggagggtagggaatgacatcttccnttgggaccccaaaggttaaaagtaatgttttgntttggttgaccactngtttggttaggccttaaaacaacattcaatgtggngggtttcaggnacactgntatntgcatcaattatttttttggtntccnnaannnccant

SEQ ID NO: 9 - DNA, 324 bp, Homo sapiens
tttagcggggaggattgaagagagtgaggtttggggatccttctcggagagagaaaggcgggcgtcgtcccttgtgccccgcgcaggccgacgcgcttagccgattccgcacgttgggcaagtgggggcacagcgtccccgggcactccggtcccggcaggtcagcctctcccgggcagcgctcacacccagtcctccgagcctggggttccacggccgaaatgcctaatgcaaagattgcaaattgcttttcaggcacatttaacagcgactgtagctgttccttaatccaggcagggaactgtgctgataatcactctgcaa

SEQ ID NO: 10 - DNA, 533 bp, Homo sapiens
  misc_feature 3: n = A,T,C or G
aantttgaagctacctgaggtttagaattccttcagccctagctgcttttattctgctttttatttaaacaaaaagagggggaggatctgaaggaaactagttttctgtacaaaggctttgaggtccatggactatacttgtcccatttatcatcccaggtggtgctttgaccctgccataccctggctattaagataaaaagatttgtggacattaaaattatgaatatgtcagtaataatccagcacacattgaaatattgacacagattaccataatttgtgcaacatcttataaacaatgtcatttccatagtagtctaaggcttcaccagcctggcccactgtatctagactttaggttcattttaataattatgctttccttctctgtatcatttgggaagttgataaatatcacttccttagataccttcattcagtgatatatctggcttttacaattaaattggaaaaggtaagtttctctttggtgggttgagagttggaccatcaattctaatctacaaaag

SEQ ID NO: 11 - DNA, 955 bp, Homo sapiens
agaaaaagaaatgctgtgtttaatcttcttaaaatgtatcttgtcctacatagttctcagaatacatatggggtatagttaggagataacaataacaagacctaaacaaattgcttatgggagatagcactgtaattagagaatttatttcatataaaataataatataaagtttgaactgattagaatgttccttaaatcatggtttcgtttgttgcagctgtcagctaacatttggttgagctcatataatccaaacctaattgtccaactattgtattgccactattgttaatttgttccttccttactttcttattgttggatcttatatgactgtatgactgtagataatagacagctagctaaatgtagagcaccatttttctcaatgagtttgttttcaaaggctttgcactggagaagatatgtgtagaatttttgttttatttttaaaatgtgtaaaacatcttttgttttatatgcttttaagaatgtagattgtaatttaggaaatggcatatattctgcaaagtggtataatgttgtatatatgaaaaacaggtatatttggtttagttctgtgtttcagtgactgataaacaaaaatgaagctaaaatgaatcaacggctcattcatagttactaaagccatgtcatgactgtcattctattatgaagaaaacagttttatttgagtgctttaatataatgcaacatttaagtcatcttaaggtgaaaagttattgaagtgttcttctctcaagttaacaaaattttacaaatgttcctgaagtgtatcgattgagggaattattttattctagcctgtcatgagtctgtctgagcatgatacttaacatgaacttgatgtagtaggtgcacatttgcctaacaggataaattcagtgatagcccaagctggtcaggagagacagaagtgctggctaggagg

SEQ ID NO: 12 - DNA, 491 bp, Homo sapiens
ttttttttttttttttttatttcaaccatgatggctccatggtcagtgatttattacacaccaggatgaggtaaaaacacctggggtggccccagggccctccatgccatcggagctggcatctccagctaaaaaatggccagttgttctgattcgtagctctcctaatcagcttccagtccagggcaaagggcagggactgctagggacctgggccccctgacaggcctggaacaacgaaggcatccatccccatccctgccactgcttctcatggaaactgtccttcccaaactcatcacatcacacaccaggctggcaagggccagccatttccggttcagaactatatacagacccccacgcacaccacctcccaccttatgcagaccccccttatttccctcagaggctcctggaatctcagggcaactgaagtgcaggctctgggccctgtcccttgctgtgactggtctgtagggccagcccct

SEQ ID NO: 13 - DNA, 572 bp, Homo sapiens
ttttttttacttataaagtcaaaaaagtttttattctctgatatataaaaccaagaaaactttaatacataatatgcatagttttgtttttttaaaaggagaaagtggcagaagtacagacctgtgtagaaaaatacacccaagcagctgttctaagcagtaattcctaaaattatgaatagcacacaaatctcagtgaaagcctcatttcttaaaaaaaaactcacatttgcttaacaacttaaaatgtgataagaaatataaccttccttcttgatagccgacccagttatataacagacattcaagaatcagcaataacttacttagtaaaagaacatttcctttgtgagggtaacattattagttttagttccacaaaaactgcttctgactgctggggcactgaacgacatgcccttcatcagagagcaagtccggggggtgcggatcctcaccggagaggtcatggggaagcatctttggtcttctcttgcttaggaacaaagggccagcaatccattgcatacaaataacatcaaacacaggtgcaggaattcacaactcctcag

SEQ ID NO: 14 - DNA, 6184 bp, Homo sapiens
ggcgaggggtgcacggcggccacctgagtggcgcggcggtgtcaggttcttgctcaagtaccaactctatggacccaggacaggtttgtcccatgacctgctgtgaacagtgtgttgtctgatagaagattcggttggcaaaccatctctctattgccttacagagcaagcaaagaagatggatcgattgaagagccatctgactgtgtgctttctaccttctgtgccctttttaatcctagtatccactctagccaccgctaagagtgtgactaacagcactttaaatggcactaacgtggtcttgggctctgtgcccgtaatcattgccagaactgaccatatcatagtcaaggaagggaacagtgccttgattaactgtagtgtttatggcatccctgacccacagttcaagtggtataattccattggcaagctgctgaaagaagaagaggatgagaaggagagaggaggaggaaaatggcaaatgcacgacagcggcctcctgaacatcaccaaggtatccttctcagaccgaggtaaatacacgtgtgtggcttctaacatctacggcaccgtgaacaacacggtgaccttgcgcgtcatcttcacttctggagacatgggtgtctactacatggtcgtgtgcctggtggccttcaccatcgtcatggtcctcaatatcacccgcctgtgcatgatgagcagccatctaaagaagactgagaaggccatcaatgagttctttaggaccgaaggtgcagagaagctgcagaaggcatttgagatcgccaagcgcatccccatcatcacctccgccaaaactctagagcttgccaaagtcacccagttcaaaaccatggagttcgcccgctacatcgaagagcttgccaggagcgtgcctctgccgcctctcattatgaactgcaggactatcatggaggagattatggaggtggttgggctggaggagcaggggcagaattttgtgaggcatactccagagggccaggaggccgcagacagggatgaggtctacacaatccccaactctctgaagcggagcgactcccctgccgctgactcggacgcctcatcgctgcacgagcaacctcagcaaattgccatcaaggtgtcagttcacccgcagtccaaaaaagagcatgcagatgaccaagagggtggacagtttgaagtcaaagatgtagaggagacagaactgtcggcggaacattcccccgaaactgcagaaccttctaccgatgtcacgtccaccgagctaacatctgaagagccaacacctgttgaggtaccagataaggtactgccgccagcttacctggaagccacagagccagcagtgacacatgacaaaaacacctgcattatttacgaaagccatgtctaataccaaccccgaaaagctatgcatatcaagaaaatcaggggctgctccttgtaatacagatgtagtacgcacttgccgctaagccttaccaggagactctcatcccttaggtaggagtgatgccactttaaaaggagaaacacctgcctgcagtgaatgggactggaatttccccagtagagaagggtgcgagaaacatcagggtgcagaattgataccagacagaaggtgtctatgtgataatgagtttcagaggctgatctctgccaaataccttaattggtgatgccttcttggcaaagagtacaccactgtaagatattctgagttcaagaaccctgtccagtgccccctgcattgcttttccttttaaaaagtataggtctgctacaatagcaaatgcacgtacgtgggttttttgcagtttcttctcagttttaattttgcttttcctttataatggggtcattgttattaatactaattgttctttctggtttagtcctcattgccacttttgtccttatgtttccctagaacacgtacctcagagactttggtatcagtcaccagtaccagggctgatatctacaagtcacattacatttgtcatgttccaaagtagttacgaggcttgttatttttttttcattccccaggcctatttccatagatagctttttttgtttgtttccaacgaagctgctgttaaacgaaactgagaaaaactttgccccggaatagcactttaatagtcaaaaatgtgtttacctgtctgattgagtgagccttttggtgagctcagctgagatgtagagggagattgtaaaaggttaaatatacccacaccacccatgaaagtcactgtttaagttacatcatcctccaaataaagactgattctttacctggaaaatatattgcttccaaagacatcagattcagtggattcctgtaggttatagaatattggcttccaaacaggcttgcagggaccatatgctgttggatgacatataaccaggtccacttttatgaactgcatagctgacttggttgtccttaaagaggaaagcgaaaggttagggtaatagcaaagggaactgtgccatcagattttatgccaaaactgttgaataattatgcagtcctgcaagaaagtggttatatgtgaggtgcgtgatgttatggaaagaagacaaaattagtcatccaaaggcttaatacccactgtgccaataaccagctgcctggctttggacaagtctggacctcaggtcccttatctgtagaaggggcagatgacatgagctctgagcactgttgaaatggtatcactgtcacacagaaccaaaccaatattcacatccttgctccttttcacaatgactttaaagatttttgctttcatctcttggtccacctaacattttcatgcttcattacttaaataagaatgttggttttgagaaatagcattttaaacaaattgtggatcttctccttccaaaaaaaccattaggaccacatctgcaattaagatttaatattggtgagaatgagtggttttatttaattttcccttaaaagcaaaggagacagtaatcttaataaattcataggggccgtggccacatcaggtaatggggttatgatgtccaagattgcatggatcacattggtgatgagagcagacccagatgtttagtcctcactctgtcaccatctgaggaggtgaccttggacaactcccttcctctctctgggatttaatctttttcatctgtaaaatatgcaggtagtactcgagggtctacaggatcccttctagttgaaacatttatagttcacagaaagtttgcagtcttccaggataaccaacccccgttgcatgagacaagcaaaaaatgggtccatgaaattggatacttttgccatccaaactttacaacaaacattatctggctctgtaattgagagcagtgggcttggttttaaacctagccttgattagtttgtttatagataactgttgtggaaggtgatagaactagtcatggagtttgatgagacatctcttgaaaaggactgaactgttgacttctggttagaagtgctttgggcagtcacataaagaaatgagcagtgagaaatcaggagaaattatgactcctgttgggctttctggactagcattgtatgtttttgggttgcagaaaagttttaacaccacctcttagaatataaaaattttccagttgtcatggaggtccacagattcattaccatgggtttatatgcccaaagcaacaacagaggacttaagttcattttgtgatactgtatggatgttaccccatcctattcagttgtcattccacccaaacccatgtgtaggtttccacatggaaaggagaaggcatccattccacctagacattgaatagtgataataagctaaaagtgggcagattttcagtggagcaagagcagaaatatgcggccaaagaatgtttcctgattggttttgctgctttagactgcagtggggagagcttatgtagattttcaaaactttctccctctttaaggcatcataatgctctcggttttgataacaactgacataaagggaggttgacttaaaatgggaatttctccttccaaaaatgctacactcttcctatccatcctacagcttctttatgaaatgagaggccctcctgctagaatatgaaatgcagaagacctcatgactttcagctgatttttcaaagataaagtgaactgttcagcttcatagaaattcatgcgagtgtgactgaacgtgtgtgcatacacactcgtgcacattggactcatttgggcagttttaaaagcttcacactaaatccaaagcctcgtcctttgggtcgtatgtagtcgtttgtaaaatcaatttctggcttctgagtcatcctggtcatatctctagcaatgtttttcttgaaattctgaaaatgattcacatatgtgtgtacatttaattcacttagatgatctgtaaacttggatggtatttattctaaatggggaaaacaattttatatggaaaaatctatgtaatttataatggttttgttttatatattatattttcatatctctagggcacatctatcctcatctttttgtataccatacttagcaaaaagaaatactaatacttgactaaaatctctaggaaccaaacgtgatacatgtgatatatagcttctagaaatcgctctaaaaatctctgaatgtctcatccatcccaagcattattgtgctgtgtcattatgtccagaatgatttgtcttggatgcttatgagcatttgtttttcacaactaaggttgaaagacctgacatctcacacaatggggttctggaattcccctttcctcctttatctgtttttattgtttgtttcatttttaattgcaccagtctatgttgtcgaaactttgttttgaagggcaaatgtgagataacaagaaagcaatgtgatggaaagactggatgaatttacctatggctatgtaaattattttaatggactgataagatgtttcaagtctcatgcttggatctttatttattggtgatctaggatctgctcagctctttagcacatgaagaaaatcaggtacaaaggacatttgcatgtttggaacagcatgctctaagccccgtgcagccaacacaaattaacttgactgtagaaacaccaattccagctgctggaagaaatggtttagaaaggcaaaccagataccttttattctgccctaggaaatacagtgttgatcagtgctaaaactcttcagtggcagtcactgtggttcttttaactggggatttcctttcagtgtttcatttggtaccaaaacagaacatttaccttacatttcagatactctgttttctcagcattgttcagatactttcctttaccgctcttcacgtacccttttggcattgagtaattctataaatgtttctatccttggtttttaaaccaagttattcatactcttaaaatatctaccaaatctcattgtattttcacatattttgagcatcaagatactggtcattttaaaaaatccttcagtaaatagcacagtttattttcctaatgacatttttagggtttcttcattgatcaaccaggtttgggttacacaaatcaattgtgggggaaaaatcaaataaaacaattgcttattatattttccaaaggactgagcatttatcttttattcacgaagatatcatatgaggatgataatgatctttaacagattttttagagatagaatttataaagaggctgatactaagaatactacaatcaaaattgaagctagagaatgtaaaaatagaaagtaaatagttctaagaatattctggcataaattatttttatttagccaataaaatagcctccaaatgtatatctcagacaccatagagctgctaacaatgagaatcaaggaagatgcttgcacttagatttcgtttgttgtatttcagtagttctggatgtcctttgttaaaattggaaaatggaaaaatgtctcgacagaaatgtcaatctggtgattctgtgaactgtaaaatgttcacttttaaaaataaagttgtaaacaagttactcatataagttggtattacagtagcaaaaacagaaaaccatgtgatccatcctgtattttgattgatgctttaataaagggtttgcacagctgtg

SEQ ID NO: 15 - DNA, 4933 bp, Homo sapiens
cagaaatgcaacaagtagtacccggggtctgcagagcgccccgcgccgcctgacttggccgggcgaagcccgcctgcagagacccgggccggcctccggacaaaggacggaggaggggctggacggcgctgcgaagtccgaaagaggccatttagcgactctggccaggctaaggggaatgcagaggagacacagagccggcgggccaagaggacgatccggccgctgcacgcagggcgggaggcgatggaggctgcccgcgccttgcgcctcctgctcgtggtgtgcggctgcctcgcgctcccgccgctggccgagcccgtgtgcccggagcgctgcgactgccagcatccccagcatctcctgtgcaccaacagggggctccgcgtagtgcccaagaccagctcgctgccgagcccccacgacgtgctcacctacagcctcggcggcaacttcataaccaacatcacggccttcgacttccaccgtctggggcagctcagacggctggacctgcagtacaaccagatccgctctctgcaccccaagaccttcgagaagctctcgcggctggaagagctgtacctggggaacaacctcttgcaggcgctcgccccgggcacgctggccccgctgcgcaagctgcgcatcctctacgccaacgggaacgagatcagccgcctaagccgcggctccttcgagggcctggagagtctagtcaagctgcggctggacgggaacgccctgggggcgctgccggacgcggtcttcgctcccttgggcaacctgctctacctacatctggagtccaaccggatccgctttctgggcaagaacgccttcgcccagctaggcaagctgcgcttcctcaacctctctgccaacgagctacagccctccctgcgccacgcggccaccttcgcaccgctgcgctccctctcctccctcatcctctcggccaacagcctgcagcacctcgggccgcgcatcttccagcacctgccacgtctcggcctgctctcgctcaggggcaaccagctcacgcacctcgcgcctgaggccttttggggcttggaggccctgcgcgagctgcgcctggagggtaatcggctgagccagctgccaactgcgctgctggagcctctgcacagcctggaggcgctggacctgagcggcaatgagctgtccgccctgcacccggccaccttcggccacctgggccggctgcgcgagctcagcctgcgcaacaacgcgctcagcgccctatccggggacatcttcgccgccagcccagccctttatcggctggatctagacggcaacggctggacctgcgactgccggctgcgaggcctgaagcgctggatgggcgactggcactcgcagggccggctcctcactgtcttcgtgcagtgtcgccaccccccggccctgcgaggcaaatacctggattacctggatgaccagcagctgcaaaatggatcctgcgcggatccctcgccctcagcttccctgaccgctgaccgcaggcggcagcccctacccacggccgcaggggaggagatgacgccacctgcaggtctcgcggaggagctgccgccgcagccgcagctccagcagcaggggcgatttctagctggggtggcctgggatggggccgccagggagctggtaggcaaccgcagcgctctaaggctgagtcggcggggcccgggcctccagcagcccagcccctccgtcgctgccgccgcgggcccggctccacagtccctagacctgcacaagaagccccagcggggccgtccgactcgggcagatcccgccctcgcggagcccaccccaacggcctctcctggctctgcgccatcgcccgccggcgacccctggcagcgcgcgacgaagcatcgtctgggcacggagcaccaggagcgtgccgcccagtccgacggtggggccgggctgccgccgctggtgtccgacccatgcgacttcaacaagttcattctgtgcaacctgacggtggaggcggtgggcgcagacagcgcctcggtgcgctgggccgtgcgcgagcaccgcagtccccggccgctgggcggcgcgcgcttccgcctgctctttgaccgctttggccagcagcccaagttccaccgcttcgtctacctgcctgagagcagcgactcggccacgctgcgcgagctgcgcggggacaccccctacctggtgtgcgtggagggcgtgcttgggggccgtgtctgccctgtggctccccgggaccactgcgcggggctggtcaccctaccggaggccgggagccggggcggcgtcgactaccagctgctgaccttggccctgctgacggtcaacgcgctgctggtgctcctggccttggcggcctgggcgtctcgctggctgcgtaggaaactgcgggctaggcggaagggcggggccccggtccacgttcggcacatgtactccacccgacggcccctgcgctccatgggcaccggcgtgtccgccgacttctcgggattccagtcgcaccggccacgcaccaccgtgtgcgcgctcagtgaggcggacctcatcgaattcccctgcgaccgcttcatggacagtgcgggcggcggcgcgggcggcagcctgagacgggaggaccgtctcctgcagcgatttgccgactaggtccagggcatatagagaccatctcattggccctaaggagccgcctctccgtgaggcccaccagcccacctcaggggaagtgccgttttgtgcacttgccagagaggccggtggggacagagggccaattcgggcaccatcccccaattcccaatactcgagaagtaaatggatggtacttggtggtcagagccagagtaggggacaaatggatggtgggatgctgaggtcggaggcttcgcttggaggctttgacacagctatgcgaatggcttttgtagcactgcaatgcagaagccaggctttgggggtagaaagggggtgcttgtgcccccaacatggccagaaatatttgggtgcatgctttttgtttgctcagtgtcaaacagagaagttttgtttctatttaaggaaggaacttattaccattacaaaggaggcttggccagggactccactggtttggtgatctctgccaagaagggggatgtaaacaggtggtaaagtttaacatacccgccaaggaactcgtttatgttggctgatagagcattcaggataccttaaagtttaataagagacgcatttttttttttcaaaaatgtgaaaagctctgacatttaacgaactgaccaatagactcaaggactgttttagttggactgggccattttattatgttccttttaatattaacagtacaagagcgcttgctgacttcgaggataactaagattacatactttctcaggagaaggctgcatgcaagacttctctgtcagggttgctcctgtggcttttttaattttatttttttaaacctatatatggaaaaggaaatttcaatgccagatttgataaaagaatgtgatgtatatgtagctgatgacccactggggaacaccagtgttccagttcacttaccacatctgtgacagtgtgtttagattggaataaatgtgatgcattacttcttatgtttttatcagtgacatggttgactgtgccctaattctcttgagttgcagttaagcaatgaaggttatttcctaatagggaagcaaaaggtgattgtcaattgatagtttaatgtttgaccacattagtgtctttatatgaaatagtagaggggaagaaattatagaaaacaaatgtgaaaaaaatacaccagtgggtatctgttctactaaaaccagaagattgttatgagtacttaaacctcactgtgaaataatgatatattttgcaattaatccctccccaactgagtgtcttactgtgttattaaatcttatcttttagttaatagttgcagtatttcttttaaatgtttttgttttaaacttaggggtaggatcctttatttgttcagttgtttccaactatttgggatactttcattccctgctatttatgaagtacatgtttatcactaagtgtagtggtttggtttacattaataattttatgtgtggtctaaaaatgcagtcactaagagaatgtacactgtggttatggtcacagtggttatggatttattggcagtggagtaccatggaggtcactgcaatggtgctaaggctgacagtggaatcttctgtttagggccttaagcccctgagggtcctggtgactcagggaatccatcacagccccgggtctttcaccccagttcactccttttatgtttggcctagattgacccatgcctgccctcttctcaacagctgagtagggaaccagccatctgaatgagctgatcgttgtttatgttcaaatgagtaaatgtccagaccacttaaaactacagctgcttttctggcagtctcgtctgcggggccaaaacttaataaaccacaggaaatagactgtcattcttagtttgctgccagggcttattttagattgagagcatactggtacatgagagcagtagtgttgtttgctcttattttcaaccagggagctatctggcaccttttgtgctcctggcttttttcaatcatagcactattgcatctcctagctatttcttttgcccagcagggtaatattgagtcccattgcaagtatggacaaggcctctggttctcctcaccacccaccttttcagccatagaacatcactgaaaatgcctaatgcctggatctgtgttctactttagtttcactgggaagtctttcagtgggagatgaataaatgttatacattgttatgtccagttatgtcaataaacccactaatagagat

SEQ ID NO: 16 - DNA, 1822 bp, Homo sapiens
gccgtcccgcgccagggctcgctccgagagccgcttccttctcgccgcggccggcgcgggccccccggccatgcgcccccgagccccagcctgcgccgccgcggcgctcgggctctgcagccttctgctgctgctcgcgcccgggcacgcgtgccccgcgggctgcgcctgcaccgacccgcacaccgtggactgccgcgaccgcgggctgcccagcgtgccagaccctttccccctggacgtgcgcaagctgctggtggccggcaaccgcatccagcggatccccgaggacttcttcatcttctacggcgacctggtctacctggacttcaggaacaactcgctgcgctcgctggaggagggcacgttcagcggctcggccaagctcgtgttcctcgacctcagctacaacaacttgacccagctgggcgccggcgccttccgctcggccgggaggctggtgaagcttagcctggctaacaacaacctggtgggcgtgcacgaggacgccttcgagaccctggagtcgctgcaggtgctggagctcaacgacaacaacctgcgcagcctcagcgtggccgccctggccgcgctgcccgcgctgcgctccctgcgtctggacgggaacccctggctgtgcgactgtgacttcgcccacctcttctcctggatccaggagaacgcatccaaactgcccaaaggccttgatgaaatccagtgctccctgcccatggagagcaggaggatatccctgcgtgagctgtcggaggccagcttcagcgagtgtaggttcagcctgtcactcacagacctctgcatcatcattttctccggtgtggccgtgtccattgcggccatcatctccagcttcttcctggccactgtggtgcagtgcctccagaggtgcgcacccaacaaagatgcggaggatgaagacgaggacaaggatgactgagccacctcctccctcctgcctcttactctccagcaccgaaccagaagctctctccaagacgagagggaaatgctgaaaatggaaaagcactggccaccatctgtgaactgaacagagcctgttccgtgtcttggcccctgggtacacctgctgggaccactgatctcagagtttagaatcagcagagcacagaagcccaggaaggatggagggaattattcctggagcataacctgcctctcagatcgaggtgtgtgttgggggagaagatgaccgagtcaggcttcatagctgatgactaaaagcctcccccaggaaatgtgaagactggcagctttcaatggcaaagatgattttacgccattctttttctgacctgtactgggagatcatgaaacatctgccttcctcccaagaaacagcagctcaaacagtggagattcaaattcggatcattcaccacaagaacgagaactttgatccttatataataggcctcagcaaccttgggatgttatactgggaactaataaactcgtgtgcaatagactcaatgtttatgttcccccagattttatatgttgaaacctaatccccaatgtgatggtatttggaggtggggcttttgggaggtgattaggtttagatcatatcatgaggatggggcccaaatgatgggattagtgccctcatgaaaggtggccccagagagctccttcaccccttcaatgcttgaggatgcagcaagaaatcagctgcccatgaaccgagaagcaggccctcaccagaacccagccatgctggcacccagatctcagacttccagcctccagaactgggagaaataaataaatgtctgttgtttgt

SEQ ID NO: 17 - DNA, 2208 bp, Homo sapiens
gggcaccgtaaccagcgccgcggacaccggcaccggcgccacggactccgcaggaccccgcgcccgccgccgccgctatgctggggctgctggtggcgttgctggccctggggctcgctgtctttgcgctgctggacgtctggtacctggtgcgccttccgtgcgccgtgctgcgcgcgcgcctgctgcagccgcgcgtccgtgacctgctagctgagcagcgcttcccgggccgcgtgctgccctcggacttggacctgctgttgcacatgaacaacgcgcgctacctgcgcgaggccgactttgcgcgcgtcgcgcacctgacccgctgcggggtgctcggggcgctgagggagttgcgggcgcacacggtgctggcggcctcgtgcgcgcgccaccgccgctcgctgcgcctgctggagcccttcgaggtgcgcacccgcctgctgggctgggacgaccgcgcgttctacctggaggcgcgctttgtcagcctgcgggacggtttcgtgtgcgcgctgctgcgcttccggcagcacctgctgggcacctcacccgagcgcgtcgtgcagcacctgtgccagcgcagggtggagccccctgagctgcccgctgatctgcagcactggatctcctacaacgaggccagcagccagctgctccgcatggagagtgggctcagtgatgtcaccaaggaccagtgaccgccaccttcacaccgtctgccctggccaccatcctgggcctgggggctgcccacagatgggcagtctcagccatactctgttccagctggagtagcctcctgaccagcctggcccaccctgctccacccactgggcccccccagttattgatacccctctgtgctgggctccacgctaggcagaaggaggagtggcattggcatcctgacccagctctgccctcaaggtggggatggatgggcaaaggagagtcctgcctggccctacgatgaggccactcatgtgggcctaggtaggggaggatggtgcctggagcagagggacccacaagtgcctcccgagcctagatcctggctcggaccactgcaagggccgaggcagggccagaccagagcatcctgggtacaggcctgggctctccagggcctgggcctgattcaggtgcagtgggcactcctgaagggtcagagcggcatctgccaggcagcccctctggcttccgctgaggtggttgcaggcctggggcagagcctgggtggtcagaggccggggctagaggcagatggaagggaggcatttgctgacagaggacggggcacccgggctccccactgcagtcggccttgcctcctcctcctcctctacctccagtcaggctggacgggagggtagccttgtggctgagaggggtcagactaggtggcacaggggctcctggaaagacagcaggcttcctgctgggcgttcccttgttggagggaatagagtgggggtgggactctgcaggggtgtccttgtccactcgcacccctcgccgcccaccagggccatgctctgtgacttgggctgatccccaccctttctgggcctacagcaccacaggccgctgtacccccttagagctgcccctctctggcctggccggcaggcgtcttcttaactcctctgtcctctatattcagcatgttccttgtcagctgctgggccggccctgccttgcgctagcagagcctctcctggcagcttctcaggtctccctaatggagacaccaggctactaggacactggctggggccaccccctcctgcctaatgcctcaccttacagctggggaaactgaggcctggaatggcccagagtcaccaaggcaaagttggggctggtcccagcctgaggctccagctgatgccctcagctcccagagagggggtgccccatctagctgggtgcaggggtcactgcttgtcagctcagggccctgtgcccgcttgcctgttcccctacatctgtgcctgcacatccagaactgcctccttgccgctgcctccaggaagcccaccttgagccagagtcaagggctgcagcactgcccgatagaacacgcccgccctcactgctgttcttgccttacagccaccatgggaaagctgcaacctttctgttttatttaaagaaagcccaacattaaagggttttcattgcaaaaaaaaaaaaaaaaaa

SEQ ID NO: 18 - DNA, 520 bp, Homo sapiens
ttttttttttttttattggagactagtctgtttttatttacaatttaagatataaattagtaaagaattcgtgttaaacaaccaacaaagattgtataaccagcaatgttcaaataaaaaccaggcagaatttatttacaaaaagtttagattccattgcaatacaacttgcataaattactagaagctttatatcattataaaaataaatatcaaatttgtttccacttctgaagtactcaagttcttccatcacgttttatttctactgtgtacatcttttacaaataaactttacagtaaatcctatcacacctatagaatatataccgtggcaatgaagtgatcaattcaagatatcctgagaaaaacagattgttttcaaaagtcacacatacatcggggaaactatactatgccaacaaattcacatatgtccaacaatagtctgttccaattgttagagtctgtgggctgacagtgctgtgtggatccttctcttttacagtggcacaagatg

SEQ ID NO: 19 - DNA, 615 bp, Homo sapiens
  misc_feature 533: n = A,T,C or G
  misc_feature 548: n = A,T,C or G
gtcgttgcctctcctctctccactcactctccgcagtcagagttacaagcttatatggtcaaagacaaaaataaaaaagaaaacgtataaaataacaatagaaaaagtaatacttctgggagaggcgccgctgcggctccgcggagctttcgttctttttttaatgcagtttcccttccgccacgtgagtaccgccttttggccaagagtttagccgcgtcctaggggagcagcagggacggtcggggtcgcggccccgggcggggctctgaagtgccgcgtgcgccagggacccaggggacaatgttggagaggtggaaggtcccgagcgagcgcctctcccgctgcccgccagagtcaggcttctggtccctatggaggagagggccgctgggcctagggtccttgtgacccacaggttctatttagcatttgatcttggaggttttgagctccttcacctgtgagtgtagcgtcttgtggacagcgagagtcctggactggcagaatcctttcccacactcttgacactngaagggcttctcttntgagtgaatatatctgtgtcttcgcagtgtcttgcctccggaaggctttgtggcagatgtcacaggg

SEQ ID NO: 20 - DNA, 4654 bp, Homo sapiens
gcagcgtagcgggctggcggtgacttacaccgggactccagagggagagaggaagcgctgcaggccacttgcattgcgtcttccaggctgcgtggacccggcgccccggcgtgtgcggttgtgggggagctcgccgtggcctcccctccctctggctttagcttcctttggggttggcgcaggtgggccaggcagcgcaccgcagatctccccgttcccacgaaggctggctcgctgtctctctccgagcgggagggaccatcctaaaaatatgtaaatatccaagcgctggctccaggctggggcagctgccaaggtccccgcgccgccgccgggtgttttacatgaaaatgagaagcctgatgggaaccgcgttctaacttaaggcagcctggtgattagcatgagactgggcggctgtcctgcttcctgcccttcaatagccgttccgcgcgctcgcgccggagcagcgctgccgccgcgcgggggtcgatcgcaggctcggcgtccttggcagccatggctccggcgccgcctcggccagtaagtaggagcatgcatgtgtagggggcacatgcgtgtcggcgcacccacccagccatccacccgcgcgcacgcacagcgcccggagcctcggcaaggggaagattgacgaggcgctgcagtcgcggggacgacgcgggctcttcctggattccgcaggagcccgcccgccgcagctgctgtctgcagagcctgctcggatcctgtgcacacgcgccccccgctcgagcctctgtgatgaagactgtctcccggggactgcagcggaggcagagccagccagcgccggggactgcgggccgtgcggctgataggcccgcggggacacgactcggacactgtcatccccacgcctcgcgctgagctgcccggcgcggagggtctgccgccgcccctccggcctcccgcacgcccgatcccgggtcagccccggaggcctcggctgcctcatttgtttgggtcttttgtgccgtggctcccagttggccaagcactcctgcgctgaatcgggccattgtctgcgctcccattgccttcacgctgcaagtctcggcgcccccaccccgcccgccccctccccgcctcctcccggccggggagcctcctaacgtgcctttccccccaggaatctggaagctataagccgggcggattgcaaatgaagtgtaatgcattgtgggacgtgtgtaaaatcggagccttcgccgtgggggtgtgggggggcgtggggagggccggacccgccgctggcggtgtagacgccgacgaggaggggctgggaaaatgtgcgcagagtccgcccgggtcgtgcccgccgtagacggatgaaggagcgcgctgcgccccggcgctgaggccccgaggatcggggcggcaggtcgccctccccaccatgaagaagacccggagcacaaccttgcggcgagcctggcctagctcggatttctcggaccgggcctcggaccgcatgaggtcccgcagcgagaaggactaccgcctgcacaagcgtttccccgcggccttcgcgccccaggcttcgcggggctacatgacatcaggtgatgtatcacccatcagtatgtctcccatcagtcagtctcagtttattccactcggggagatcctctgcttggccatctcagcaatgaactcggcaagaaagcctgtcacccaagaagcactgatggagcacctgaccacgtgcttcccaggtgttccaacgccaagccaagaaattctgcggcacacgctgaacacgctggtacgggagaggaagatctacccaactccagatggctacttcatcgtgaccccacagacttatttcataactccttccctcataagaactaacagtaaatggtaccatttggacgagaggatacctgaccggtctcagtgcacctctccgcaacccgggaccatcacgccctctgcctcaggctgtgtcagggaaaggacattgccccgaaaccactgcgactcttgccactgctgcagagaagacgtgcacagcacgcatgcacccaccctgcaaaggaagtctgccaaggactgcaaagacccttactgtcccccttctctgtgccaggtgccacccactgaaaagagcaaaagtactgtaaatttttcctataagacagaaactctctcaaaacctaaagatagtgaaaagcagtcaaaaaaattcgggctaaagttattccggttaagttttaaaaaagacaagaccaaacagctggccaatttttctgcccagtttcctcctgaagagtggcccctgcgagacgaggacacgccagctacgatccctcgggaagtagagatggaaatcattaggcgcattaacccagacctgaccgtggaaaatgtcatgcggcacaccgcgctcatgaagaaactggaagaagaaaaggcccagaggagtaaagccgggtcctctgcccatcacagcggaaggagtaaaaagagtaggactcatcggaagtcccatggaaagtctcggtctcacagcaagacacgggtgtctaaaggagacccttccgacggttcacatctggatatcccagctgaaagagagtatgacttttgtgatcctcttaccagggtgcccagggagggctgcttcatcattgaacacaaaggagataacttcatcatgcacagcaacacaaacgtgctcgagtcccacttccccatgacaccagaatgggatgtgtctggtgaattggctaaaaggagaactgagatgccttttcctgaaccttctaggggaagctcccactcaaaagtgcaccgaagccacagccatacacaggaccggaggtccaggaatgagagatccaacaaagccaaggagagatccaggtcgatggataactccaaaggccctctgggtgcttcttctctagggacgccggaagaccttgctgaaggctgcagccaagacgaccagacccccagccaatcctacattgacgacagtactttaaggcctgcacagaccgttagtctccaaagggctcacatttcgtccacaagctataaagaggtgtgtattccagagatagtcagtggcagcaaggaaccgtccagcgcttgcagccttttggagccaggaaaaccacccgagagtttgccatcctatggcgaactcaactcttgtccaacaaaaacagccacagatgactatttccagtgcaacacctctagtgagacggtgctcacggcaccatcacctctgggaaagaataaggaggaccatgacactctgactttggcagaaggggtgaaaaagctctccccttctgataggcaggtcccccactcctccagggagcctgtggggcacaaggaggagtcaccaaaagggccgggtgggggccccgctgcttcgggaggagtggctgaagggatcgccaacggacgcctcgtccagcaccatggtgccgagcccagcagcttggacaagaggaaagagatatttagcaaagacacactgttcaaacctcttcacagcaccttgtctgtaaacagctatcacaagtcgagcctgtccctcctcaaatctcacccgaagacacctgctgacacattgccaggccgatgtgagaaactggaaccgtccctggggacctcggcggcacaagccatgcctgcttcccagcgtcagcaggagtcaggagggaaccaggaagcctcttttgactattacaacgtctctgatgatgacgactctgaggaaggggcaaacaagaacacagaggaggagaaaaatagagaggacgtaggcaccatgcagtggctcctcgagcgggagaaggaaagagacttgcagaggaaatttgaaaagaacctcacccttcttgctccaaaagaaaccgacagcagcagcaaccagagagccacccattcagcccggctcgacagcatggacagcagcagcatcacagtggacagtggattcaactccccacgtactcgggagagcctggcttccaacacatcaagcattgttgaaagtaaccgtcgtcagaaccccgctttgagcccggcccatggtggagctggtccagccttcaacttccgagcgagcgcggagcccccgacaaatgaagctgagaagctacagaaaccttccaactgcttgcaagcttctgttactagcgtgtgattgtccttctgcctcagatcttctgtctcattcgatacagcaaagtttacgacactgggactgatgtttacatctttggaaagacaagcatctcaaccacagtttttgtgtttacttaaactgtgctgctaagtagggctagggcaaaaaaacaaaaaatctttatttcagagtattgcttttcacatttatggctctgtagcaactgagtaacagtaggggtgatatgtatacttttgcttcactaattgtatctgagcacacataggaaagtctagacactgtaagtgtaatacgcattttcaatgtcatgcagttgccaattccattttaaaatgccacagatgcgtgttgctcccagtctgtggttaaacggtgccacagaactgatccttgacacttccaaaaaaaaaaaaacaaaacaaaacaaaaaaaatt

SEQ ID NO: 21 - DNA, 4031 bp, Homo sapiens
cttcaaagggttgagtctgggggctcatcagaagaggtaatcccaagtgacttggaatctgcaacaggtgggttaggacctcatccttagatattgctttaaccaatttatgggtaagccatagttctgagcagagtcacgtgctcacgcgccccacgtgtagtgacaacgggaatgtaggcttaaacataggtaacagcttcaaaagagtttgtaaaaacaaggctgtgaatatcaatataattgtgagacttttggggatttattgtaggtttgaacgtaacttgaaatacagtgatttgtagacagtcagtaattgcttcacttgctccatttggaattttgtaactattcacttctccagcagcataaggtggttaagaagacagtttctgttcgttgtaaaaaattactccaggcttaaggaggacaactattgtgtctttatattcatatacccaggatttagcacagtgcctaatccataagggccacactaaaatgtttgcccagtgaataaatcctggataatatcatcctgtctgcaaagccagtattacagagtgattggttgccagtaggggagatagctccctttggttacacaaattgtggcagacattgaaccactccaaaagaaactaaagctatttatttggggattgaaacaaaaaagcctacacaacttgaaaaaagcataaagacactcagatggaaccatagtgtctcccagcagatatcaccagatgggggtgggggtaaataattgcagtcacatatgcagcaggtatatatatttttactaatggcttattcttaaacaggacttgaggccagagaaatttcaaggataaattgctttgggagaatgcctgatatcaatgtctcctgagacatagaagttttccaaaataacaaatcaccagatatattattttgttgcctcctcttccttcccctggcccctgccaatatgcttatttacaagagttaccttatcagttgtcttaggagaacacatttccttcaacagaagtcacagtatcatcttatggtcataattttacaatatccctgcctctactgagaagagatacatagcgaatggagatgtgctgagccaatgaggaattaatcctaggcagcactagtagatgtggccacagctctggccccaccccactctggtggtcaggccaaaaaagaagtcaggtaagaagtgtgaaaggaaattcaatcttgggacccccaaactcattaagccacagggaaaattcaagctgggaactgggtcacgcaaacatgcctcccccttttggttcctaaataagatggctacaagatgaaaagctacatgcctcccccatattttgcccacaagggaattcccagtgagctgctagatctttacactaaaggtgtttctattaaaatttcaccatggcaatataaattgatagtttatagatgcagtcacccctggcccaccagacacaaatgcatatctgattgttcccctggcccagttttgtctgttatcttatataaaatgcagattccctgcaattttcctctgcctcatttgtctgtgtcatcttatgttaaaaaaaaatgcagattcactgagccagacaaaggcatgaatgactgtttttccctacccacctcttacatgaaaattgtgtacttctcaatatcctgccctttcccctttaaatttggagccttcaaaatcatctttggagaaaggcatagacctgtctcctaggtgtgcatccttaactttggcaaataaacctcctaaaataattgagacttgtcatttttctcgattgacagaagaaaagacagagccaagaggatggcagtgtacttggctacccccagagcctagctgaggctccagccctgggcacttcactggagcattcccttgccagcagaggaacctgcagcctaacctcatgctggggtaaccttaatgtgggcaatccgtcttactgtaatagacaaattgcctgctttcacttaatccacagatttacaagggacaaactttggccctaggaatatttattgaatatcatttcatccctgtgacttccacttctttctgattcccatatcaccagcccaagagaacttgagtatctgttcacagctttgctcctctttccccacattaaccacaaagcaacggaaatagaataaagagacaaatgggtaactctaagtaggttcatcacattcattacatgccctgtatccagagccaatataaatggtcttgattctgattgtgttgaggtataaaaacatgctgatttctgtggcaggtattaatgattattacttgtgtattcatttgctcactgctccattctggatgttcttggtctcagggcctaaggatcattttctcggatgcatcacggctcatcttccggctcagttcctccagtggtgtgcgggccaccctcagactgtacgcagagagctacgagagggatcccagcggccatgaccaggagccacaggcagtgctgagccctctcatagccatcgcactgaaaatatcccagattcatgagagaactggccggaggggacccactgtcatcacctgaatagaggaaagatcactcaccagggccaaagagagtgctcagcgggagatgcttcactgatgccttcttgctacctgtttgtgcctcttatgactttggaaaaacaaaagatattttgcttttgggggatagagggtgggtgggaaaagaaaaaaaatccatttggttttggttttgtcctattcctccaaatgcagcagggcctttagttgtctgttaaagctgcactataatttggtatctacattttatcacacaaaggaacctccccttttgacaacaactgggctaggcagctgttaatcacaacatttgtgcatcacttgtgccaagtgagaaaatgttctaaaatcacaagagagaacagtgccagaatgaaactgaccctaagtcccaggtgcccctgggcaggcagaaggagacactcccagcatggaggagggtttatcttttcatcctaggtcaggtctacaatgggggaaggttttattatagaactcccaacagcccacctcactcctgccacccacccgatggccctgcctcccccatcccatccccaacatccctgtaccaccttctctcacatcttctaaagctttgtacaaatcacaatggtgcacttccaacaaaatatatcaataggtgttttcctctcttattttgtaaatagtattattttagctattaagctggataccttctttcaaattcagccattcagttgtaaagttgggaagaagtttcttgacaagactctgcaattaaatgcttaaaatttggaggggatccttccttgattacatcaagtatgttggtacatgggtttatacaagttcctcttgagaaggcaaaaagaccaccatgtgtgagagctctttgacttggccaataggggcctatcttaatgcacttgtttggacacatttctgatcttatttgtaaaggctgcaaaaggagaggatgaaatgctgtaaaagtaggaaatgaagtggaagctggaagaaaatgtaattggtggtacagctatgggccagatggtggaggggagggtggggacccctgccggcaagcagagtgtcacagctggctttcctcacttgggaaaagggtactgccggtctagcagcctcctctgtactcagccaggacacccagcgcgtgggacctgtttgtgtctgttttgcttccttgggaacggcacagtcactcaccctgccatttgcggaaatgacctggtgcactttgactgttaagcaatgcgttattgctgtagtcaaggttagtgcaagcaaggaaacattcccagtaaggtatttgtttccattttctgtctgtgcttctgtcagaaacttgctaggacatttagtggccaataaaaaagaaattcctaatttcaacctt

SEQ ID NO: 22 - DNA, 2635 bp, Homo sapiens
ggacgtggccctctatgtgggcctcatcgccgtggccgtctgcctggtcctgctgctgcttgtcctcatcctcgtttattgccggaagaaggaggggctggactcagatgtggctgactcgtccattctcacctcaggcttccagcccgtcagcatcaagcccagcaaagcagacaacccccatctgctcaccatccagccggacctcagcaccaccaccaccacctaccagggcagtctctgtccccggcaggatgggcccagccccaagttccagctcaccaatgggcacctgctcagccccctgggtggcggccgccacacactgcaccacagctctcccacctctgaggccgaggagttcgtctcccgcctctccacccagaactacttccgctccctgccccgaggcaccagcaacatgacctatgggaccttcaacttcctcgggggccggctgatgatccctaatacaggaatcagcctcctcatccccccagatgccataccccgagggaagatctatgagatctacctcacgctgcacaagccggaagacgtgaggttgcccctagctggctgtcagaccctgctgagtcccatcgttagctgtggaccccctggcgtcctgctcacccggccagtcatcctggctatggaccactgtggggagcccagccctgacagctggagcctgcgcctcaaaaagcagtcgtgcgagggcagctgggaggatgtgctgcacctgggcgaggaggcgccctcccacctctactactgccagctggaggccagtgcctgctacgtcttcaccgagcagctgggccgctttgccctggtgggagaggccctcagcgtggctgccgccaagcgcctcaagctgcttctgtttgcgccggtggcctgcacctccctcgagtacaacatccgggtctactgcctgcatgacacccacgatgcactcaaggaggtggtgcagctggagaagcagctggggggacagctgatccaggagccacgggtcctgcacttcaaggacagttaccacaacctgcgcctatccatccacgatgtgcccagctccctgtggaagagtaagctccttgtcagctaccaggagatccccttttatcacatctggaatggcacgcagcggtacttgcactgcaccttcaccctggagcgtgtcagccccagcactagtgacctggcctgcaagctgtgggtgtggcaggtggagggcgacgggcagagcttcagcatcaacttcaacatcaccaaggacacaaggtttgctgagctgctggctctggagagtgaagcgggggtcccagccctggtgggccccagtgccttcaagatccccttcctcattcggcagaagataatttccagcctggacccaccctgtaggcggggtgccgactggcggactctggcccagaaactccacctggacagccatctcagcttctttgcctccaagcccagccccacagccatgatcctcaacctgtgggaggcgcggcacttccccaacggcaacctcagccagctggctgcagcagtggctggactgggccagccagacgctggcctcttcacagtgtcggaggctgagtgctgaggccggccaggcccgacacctacactctcaccagctttggcacccaccaaggacaggcagaagccggacaggggcccttccccacaccggggagagctgctcggacaggccccctcccggccgaagctgtcccttaatgctggtccttcagaccctgcccgaactcccacctctccatggcctgcctagccaggctggcactgccactcacactcggccccagggcccaggagggacagtgcctggagcctgggccaggcccagcccatctgtgtgtgtgtatgtgcgtgtgatgctacctctcctcccgtccctctccaggggccccgcatacacacggccatgcacgcacacactgggcctgggccagggccccagagctcctgcctgagctggaccttatgcaaacatttctgtgcctgctgggtaggggcacgtctgaggggccctgctccaagcctgcaggaccgagggccacagccggacagggggtagcccctggattcaggcacacgaccaccacacgagcacgtgccacgcatgcctcgtgtgctcatctcacacacacccccctcccgggtcacgcagacaccccccaaccacacacatctcatgccgtacacctgaggctgctcacgtctcacgcccagtgttggtgcacatttgcctctcacatgctgccctctccacccacccagggacaccccacggctcctccctgcccctgcccctcccccagccttgaggtgccctgcccggcggggcctgtgaatatgcaatgggagtcccaggctgtacagtggtgagtgtgtgtgtggcgtggcgtgcccgtccccagggctggctggtgccccacgcggggcctgtcatgtgaagctcgtgtcctgactttgtcttaagtgcattcacgcacttactcttggccttatgtacacagccttgcccggccgccggggcacataggggttttatcgggcgtgaatgtaaataaattatatatatatattg

SEQ ID NO: 23 - DNA, 2061 bp, Homo sapiens
agaggaagccaagaacggtgaaaaggccaggcggagttcagaggaggtggacggccagcacccggcccaagaggaggtcccggaatcgccccagacctctggcccagaggcagaaaataggtgtgggagccccagggaggaaaagccagctggagaggaagcagagatggaaaaggctacagaggtgaagggggagagggtgcaaaatgaagaggtgggacctgaacatgacagccaagaaacaaagaagctggaggagggagctgcagtgaaggagaccccccacagtccccctggaggagtgaagggcggagatgtccccaagcaggaaaaaggcaaggaaaaacaacaggagggggcagtgctcgagccaggctgcagcccccagaccggccctgcccagctggagaccagcagtgaggtccagagcgagccagcagtccccaagccggaggatgacactcctgtccaggacactaaaatgtgaagaacagctcattgtgccccagtgatgaagttgctggacacatctctttgcaggtagcagcaacagttgtagcagcagcagacgaagccattgcagaggcagaatatgctgagtgtctggagtcagcctgaagacacagggtggattatttcctggcctccacaccaaacgttcccttgcagatggagactgaatctgagggcagcagacttttatcagcttgagtttatgtcatttgatggacttggttcaacaacaagaacttacttaaaacaatgtactgtggtgatgagtcccaggggcactggtcagcctgtggagccctggatgctatccacacccacctatccctgcagctaatttagctgatctctaatttaactgagctctaatttagctgatcagattttgcttgggtaaagttcctttttaatgttctaaagtgtttacggttctcaaatatcagttaaaaactaattttaggtggccataaacataaaatagaaaccctgtaagttacagaagaccctaaattgtatcaaaaccctagagacaacttttcaatttgatccaaatttgaactggccaaccagtctttaaaacactggactagaagagataatgattgaaacatttaaaaaaaaaaagtgctccattcgcaggagcttttcctgtcctgtggttttccagttggtgaccaccatgggaggtcgctggctcggctcactcccttctcccacccttgagaatgtggagaactcccatggagaggcagaatggcaggaggtttcatgtcccgcgttgcatctcctcctgaaagaaaagcagtgatacctgaataatgctggctctccgattgatcctgtgaggatgaatttgcatttccagaatccttgagcatggattagatgtttcctgggaggtgccttgagtaccattatgtgcaagctacataattaaaacatttttcttagtttccctgggaagcttttcttgactcacagcccaggttcttctgcccaacacaaaaggagtgagttggggtctttagtctcttcttattgggtagctcttgctttaatattctgtttggtgagtgtaagggattctgcaagggacagggggcctgactacccagtctttgacttgtatcctctcccctcttcatacactcctgctgaaaaatgttaatccaaatacacatttaaacttagggtcggtccttattctgatttgagtattttaatgtctcagtgtgctgatttggtagttggaagaattattcttctggaggtctgttagactacatcctacactgacttcagaaaacagtctgtcagacaaaaaggccttatgtcaccactggtacctcagtttcctcatcccatttacagtttttctaactccagggtagtgtttagtgttaatatttgggatatattttttttcaaaactgtttttaagtagtttgtaatttgtaacaaacttgtaacctggttgggactgatattgtcatagctatgataaactttggatattagcagaatttgggaaaaaaaaaaaaaaaaaaaaaa

SEQ ID NO: 24 - DNA, 2225 bp, Homo sapiens
ggtttccaccccgtcaactttaagacggcaaggcccagcaacccgcagctcctacacccctctgtgcctcctgacctgacagccagcgccggcatctaccgcggacccgtgtatgccctgcaggactccaccgacaaaatccccatgaccaactctcctctgctggaccccttacccagccttaaggtcaaggtctacagctccagcaccacgggctctgggccaggcctggcagatggggctgacctgctgggggtcttgccgcctggcacataccctagcgatttcgcccgggacacccacttcctgcacctgcgcagcgccagcctcggttcccagcagctcttgggcctgccccgagacccagggagcagcgtcagcggcacctttggctgcctgggtgggaggctcagcatccccggcacaggggtcagcttgctggtgcccaatggagccattccccagggcaagttctacgagatgtatctactcatcaacaaggcagaaagtaccctcccgctttcagaagggacccagacagtattgagcccctcggtgacctgtggacccacaggcctcctgctgtgccgccccgtcatcctcaccatgccccactgtgccgaagtcagtgcccgtgactggatctttcagctcaagacccaggcccaccagggccactgggaggaggtggtgaccctggatgaggagaccctgaacacaccctgctactgccagctggagcccagggcctgtcacatcctgctggaccagctgggcacctacgtgttcacgggcgagtcctattcccgctcagcagtcaagcggctccagctggccgtcttcgcccccgccctctgcacctccctggagtacagcctccgggtctactgcctggaggacacgcctgtagcactgaaggaggtgctggagctggagcggactctgggcggatacttggtggaggagccgaaaccgctaatgttcaaggacagttaccacaacctgcgcctctccctccatgacctcccccatgcccattggaggagcaagctgctggccaaataccaggagatccccttctatcacatttggagtggcagccagaaggccctccactgcactttcaccctggagaggcacagcttggcctccacagagctcacctgcaagatctgcgtgcggcaagtggaaggggagggccagatattccagctgcataccactctggcagagacacctgctggctccctggacactctctgctctgcccctggcagcactgtcaccacccagctgggaccttatgccttcaagatcccactgtccatccgccagaagatatgcaacagcctagatgcccccaactcacggggcaatgactggcggatgttagcacagaagctctctatggaccggtacctgaattactttgccaccaaagcgagccccacgggtgtgatcctggacctctgggaagctctgcagcaggacgatggggacctcaacagcctggcgagtgccttggaggagatgggcaagagtgagatgctggtggctgtggccaccgacggggactgctgagcctcctgggacagcgggctggcagggactggcaggaggcaggtgcagggaggcctggggcagcctcctgatggggatgtttggcctctgcttcctcccagttcacagccagagttgcctctcctcctcctcttccccaacccccagaccatgaccagccttagaaaatccatgtactctgttgttagagggcccagagttccttctccacccccgctctctctctcttggcctgagatctctgtgcaggaaccaagatggggctgaagcctctggaggcagttggttgggggcgggcaggcaggaggccctccctccacccccccaccctcagcccggcaacttctgggttccatgggttttagttccgttctcgttttcttcctccgttattgatttctcctttctccctaagcccccttctgcttccacgcccttttcctctttgaagagtcaagtacaattcagacaaactgctttctcctgtccaaaagcaaaaaggcaaaggaaagaaagaaagcttcagaccgctagtaaggctcaaagaagaagaaaaacaccaaaaccacaagggaaaagaaaaacccagtttcttaggaaacgcaaacgatttattatccagattatttggataagtccttttt

SEQ ID NO: 25 - DNA, 5862 bp, Homo sapiens
gcatctggaaatcttgacaaaaatgccagattttctgccatctacaggcaagacagcaataagctatccaatgatgacatgctcaagttacttgcagactttcggaaacctgagaagatggctaagctcccagtgattttaggcaatctagacattacaattgataatgtttcctcagacttccctaattatgttaattcatcatacattcccacaaaacaatttgaaacctgcagtaaaactcccatcacgtttgaagtggaggaatttgtgccctgcataccaaaacacactcagccttacaccatctacaccaatcacctttacgtttatcctaagtacttgaaatacgacagtcagaagtcttttgccaaggctagaaatattgcgatttgcattgaattcaaagattcagatgaggaagactctcagccccttaagtgcatttatggcagacctggtgggccagttttcacaagaagcgcctttgctgcagttttacaccatcaccaaaacccagaattttatgatgagattaaaatagagttgcccactcagctgcatgaaaagcaccacctgttgctcacattcttccatgtcagctgtgacaactcaagtaaaggaagcacgaagaagagggatgtcgttgaaacccaagttggctactcctggcttcccctcctgaaagacggaagggtggtgacaagcgagcagcacatcccggtctcggcgaaccttccttcgggctatcttggctaccaggagcttgggatgggcaggcattatggtccggaaattaaatgggtagatggaggcaagccactgctgaaaatttccactcatctggtttctacagtgtatactcaggatcagcatttacataattttttccagtactgtcagaaaaccgaatctggagcccaagccttaggaaacgaacttgtaaagtaccttaagagtctgcatgcgatggaaggccacgtgatgatcgccttcttgcccactatcctaaaccagctgttccgagtcctcaccagagccacacaggaagaagtcgcggttaacgtgactcgggtcattattcatgtggttgcccagtgccatgaggaaggattggagagccacttgaggtcatatgttaagtacgcgtataaggctgagccatatgttgcctctgaatacaagacagtgcatgaagaactgaccaaatccatgaccacgattctcaagccttctgccgatttcctcaccagcaacaaactactgaagtactcatggtttttctttgatgtactgatcaaatctatggctcagcatttgatagagaactccaaagttaagttgctgcgaaaccagagatttcctgcatcctatcatcatgcagtggaaaccgttgtaaatatgctgatgccacacatcactcagaagtttcgagataatccagaggcatctaagaacgcgaatcatagccttgctgtcttcatcaagagatgtttcaccttcatggacaggggctttgtcttcaagcagatcaacaactacattagctgttttgctcctggagacccaaagaccctctttgaatacaagtttgaatttctccgtgtagtgtgcaaccatgaacattatattccgttgaacttaccaatgccatttggaaaaggcaggattcaaagataccaagacctccagcttgactactcattaacagatgagttctgcagaaaccacttcttggtgggactgttactgagggaggtggggacagccctccaggagttccgggaggtccgtctgatcgccatcagtgtgctcaagaacctgctgataaagcattcttttgatgacagatatgcttcaaggagccatcaggcaaggatagccaccctctacctgcctctgtttggtctgctgattgaaaacgtccagcggatcaatgtgagggatgtgtcacccttccctgtgaacgcgggcatgactgtgaaggatgaatccctggctctaccagctgtgaatccgctggtgacgccgcagaagggaagcaccctggacaacagcctgcacaaggacctgctgggcgccatctccggcattgcttctccatatacaacctcaactccaaacatcaacagtgtgagaaatgctgattcgagaggatctctcataagcacagattcgggtaacagccttccagaaaggaatagtgagaagagcaattccctggataagcaccaacaaagtagcacattgggaaattccgtggttcgctgtgataaacttgaccagtctgagattaagagcctactgatgtgtttcctctacatcttaaagagcatgtctgatgatgctttgtttacatattggaacaaggcttcaacatctgaacttatggatttttttacaatatctgaagtctgcctgcaccagttccagtacatggggaagcgatacatagccagaacaggaatgatgcatgccagattgcagcagctgggcagcctggataactctctcacttttaaccacagctatggccactcggacgcagatgttctgcaccagtcattacttgaagccaacattgctactgaggtttgcctgacagctctggacacgctttctctatttacattggcgtttaagaaccagctcctggccgaccatggacataatcctctcatgaaaaaagtttttgatgtctacctgtgttttcttcaaaaacatcagtctgaaacggctttaaaaaatgtcttcactgccttaaggtccttaatttataagtttccctcaacattctatgaagggagagcggacatgtgtgcggctctgtgttacgagattctcaagtgctgtaactccaagctgagctccatcaggacggaggcctcccagctgctctacttcctgatgaggaacaactttgattacactggaaagaagtcctttgtccggacacatttgcaagtcatcatatctgtcagccagctgatagcagacgttgttggcattgggggaaccagattccagcagtccctgtccatcatcaacaactgtgccaacagtgaccggcttattaagcacaccagcttctcctctgatgtgaaggacttaaccaaaaggatacgcacggtgctaatggccaccgcccagatgaaggagcatgagaacgacccagagatgctggtggacctccagtacagcctggccaaatcctatgccagcacgcccgagctcaggaagacgtggctcgacagcatggccaggatccatgtcaaaaatggcgatctctcagaggcagcaatgtgctatgtccacgtaacagccctagtggcagaatatctcacacggaaagaagcagtccagtgggagccgccccttctcccccacagccatagcgcctgcctgaggaggagccggggaggcgtgtttagacaaggatgcaccgccttcagggtcattaccccaaacatcgacgaggaggcctccatgatggaagacgtggggatgcaggatgtccatttcaacgaggatgtgctgatggagctccttgagcagtgcgcagatggactctggaaagccgagcgctacgagctcattgccgacatctacaaacttatcatccccatttatgagaagcggagggattttgagaggctggcccatctgtatgacacgctgcaccgggcctacagcaaagtgaccgaggtcatgcactcgggccgcaggcttctggggacctacttccgggtagccttcttcgggcaggcagcgcaataccagtttacagacagtgaaacagatgtggagggattctttgaagatgaagatggaaaggagtatatttacaaggaacccaaactcacaccgctgtcggaaatttctcagagactccttaaactgtactcggataaatttggttctgaaaatgtcaaaatgatacaggattctggcaaggtcaaccctaaggatctggattctaagtatgcctacatccaggtgactcacgtcatccccttctttgacgaaaaagagttgcaagaaaggaaaacagagtttgagagatcccacaacatccgccgcttcatgtttgagatgccatttacgcagaccgggaagaggcagggcggggtggaagagcagtgcaaacggcgcaccatcctgacagccatacactgcttcccttatgtgaagaagcgcatccctgtcatgtaccagcaccacactgacctgaaccccatcgaggtggccattgacgagatgagtaagaaggtggcggagctccggcagctgtgctcctcggccgaggtggacatgatcaaactgcagctcaaactccagggcagcgtgagtgttcaggtcaatgctggcccactagcatatgcgcgagctttcttagatgatacaaacacaaagcgatatcctgacaataaagtgaagctgcttaaggaagttttcaggcaatttgtggaagcttgcggtcaagccttagcggtaaacgaacgtctgattaaagaagaccagctcgagtatcaggaagaaatgaaagccaactacagggaaatggcgaaggagctttctgaaatcatgcatgagcagctgggatgatctgccccctggaggagaagacgagcgtcttaccgaattcccttcacatcttcaacgccatcagtgggactccaacaagcacaatggttcacgggatgaccagctcgtcttcggtcgtgtgattacatctcatggcccgtgtgtggggacttgctttgtcatttgcaaactcaggatgctttccaaagccaatcactggggagaccgagcacagggaggaccaggggaaggggagagaaaggaaataaagaacaacgttatttcttaacagactttctataggagttgtaagaaggtgcacatatttttttaaatctcactggcaatattcaaagttttcattgtgtcttaacaaaggtgtggtagacactcttgagctggacttagattttattcttccttgcagagtagtgttagaatagatggcctacagaaaaaaaaggttctgggatctacatggcagggagggctgcactgacattgatgcctgggggaccttttgcctcgaggctgagctggaaaatcttgaaaatattttttttttcctgtggcacattcaggttgaatacaagaactatttttgtgactagtttttgatgacctaagggaactgaccattgtaatttttgtaccagtgaaccaggagatttagtgcttttatattcatttccttgcatttaagaaaatatgaaagcttaaggaattatgtgagcttaaaactagtcaagcagtttagaaccaaaggcctatattaataaccgcaactatgctgaaaagtacaaagtagtacagtatattgttatgtacatatcattgttaatacagtcctggcattctgtacatatatgtattacatttctacatttttaatactcacatgggcttatgcattaagtttaattgtgataaatttgtgctgttccagtatatgcaatacactttaatgttttattcttgtacataaaaatgtgcaatatggagatgtatacagtctttactatattaggtttataaacagttttaagaatttcatccttttgccaaaatggtggagtatgtaattggtaaatcataaatcctgtggtgaatggtggtgtactttaaagctgtcaccatgttatattttcttttaagacattaatttagtaattttatatttgggaaaataaaggtttttaattttatttaactggaatcactgccctgctgtaattaaacattctgtaccacatctgtattaaaaagacattgctgacc

SEQ ID NO: 26 - DNA, 651 bp, Homo sapiens
gtggaacttgctatgatcatggaccggctgtatggtggagtttgttatgcaggaattgatacagatcctgagctaaaatacccaaaaggtgctgggcgagttgctttctccaatcagcagagctatattgctgccattagtgctcggtttgttcagcttcagcatggtgatattgataaacgtgtggaggtaaagccatatgtgctagatgaccagatgtgtgatgaatgccagggcgcacgctgtggtggaaaatttgctccctttttttgtgccaatgtcacttgcctgcagtattactgtgagttttgttgggcaaatatccactctcgtgctggacgtgagttccataagccattggtaaaggaaggtgctgatcgcccacgtcagatccacttccgctggaactaagaatagcaaactggcctctgtttaacaaggaaagaaagggtgcatgtggcttactgtgtctgaagatactgacatgcagaagaaataagtgcattcttctgcttttcaccccagctatcaatacatgcatctttatcagcagccaaaacactacaagcctcttgtttttcaccaaaaccctacatctcaggcttactaatttttgtgatattttcatgttcaaataaaatgtttttttgt

SEQ ID NO: 27 - DNA, 2426 bp, Homo sapiens
ccacgcagcggcgggagagtgagcactcgggcggcggcgtcctggagacccgcgagagatggaagcggcggcgacgccggcggctgccggggcggcgaggcgcgaggagctagatatggatgtaatgaggcccttgataaatgagcagaattttgatgggacatcagatgaagaacatgagcaagagcttctgcctgttcagaagcattaccaacttgatgatcaagagggcatttcatttgtacaaactcttatgcaccttcttaaaggaaatattggaactggccttttaggacttccattggcaataaaaaatgcaggcatagtgcttggaccaatcagccttgtgtttataggaattatttctgttcactgtatgcacatattggtacgttgcagtcactttctatgtctgaggtttaaaaagtcaacattaggttatagtgacactgtgagctttgctatggaagtgagtccttggagttgtcttcagaagcaagcagcatgggggcggagtgtggttgacttttttctggtgataacacagctgggattctgtagtgtttatattgtcttcttagctgaaaatgtgaaacaagttcatgaaggattcctggagagtaaagtgtttatttcaaatagtaccaattcatcaaacccttgtgagagaagaagtgttgacctaaggatatatatgctttgctttcttccatttataattcttttggtcttcattcgtgaactaaagaatctatttgtactttcattccttgccaacgtttccatggctgtcagtcttgtgataatttaccagtatgttgtcaggaacatgccagatccccacaaccttccaatagtggctggttggaagaaatacccactcttttttggtactgctgtatttgcttttgaaggcataggagtggtccttccactggaaaaccaaatgaaagaatcaaagcgtttccctcaagcgttgaatattggcatggggattgttacaactttgtatgtaacattagctactttaggatatatgtgtttccatgatgaaatcaaaggcagcataactttaaatcttccccaagatgtatggttatatcaatcagtgaaaattctatattcctttggcatttttgtgacatattcaattcagttctatgttccagcagagatcattatccctgggatcacatccaaatttcatactaaatggaagcaaatctgtgaatttgggataagatccttcttggttagtattacttgtgccggagcaattcttattcctcgtttagacattgtgatttccttcgttggagctgtgagcagcagcacattggccctaatcctgccacctttggttgaaattcttacattttcgaaggaacattataatatatggatggtcctgaaaaatatttctatagcattcactggagttgttggcttcttattaggtacatatataactgttgaagaaattatttatcctactcccaaagttgtagctggcactccacagagtccttttctaaatttgaattcaacatgcttaacatctggtttgaaatagtaaaagcagaatcatgagtcttctatttttgtcccatttctgaaaattatcaagataactagtaaaatacattgctatatacataaaaatggtaacaaactctgttttctttggcacgatattaatattttggaagtaatcataactctttaccagtagtggtaaacctatgaaaaatccttgcttttaagtgttagcaatagttcaaaaaattaagttctgaaaattgaaaaaattaaaatgtaaaaaaattaaagaataaaaatacttctattattcttttatctcagtaagaaataccttaaccaagttatctctcttttatgctactcttttgccactcacttgagaacagaataggatttcaacaataagagaataaaataagaacatgtataacaaaaagctctctccagatcatccctgtgaatgccaaagtaaactttatgtacagtgtaaaaaaaaaaaatctcagttatgtttttattagccaaattctaatgattggctcctggaagtatagaaaactcccattaacataatataagcatcagaaaattgcaaacactagaattaattttacactctaatggtagttgatcttcatagtcaagaggcactgttcaagatcatgacttagtgtttcaatgaaatttgaaaagggactttaaaacttatccagtgcaactcccttgtttttcgtcagaggaaaaggaggcctagaaaggttaagtaacttggtcgagaccactcagccttgagatcaagaaaacctaatcttctgactcccaggccaggatgttttatttctcacatcatgtccaagaaaaagaataaattatgttcagcttaa

SEQ ID NO: 28 - DNA, 5734 bp, Homo sapiens
cttggccttcagcccctgcctcggccagaggtttcatttttaactgaatatttacgaaagctgaaagcgtgcgaggggggtggggtggaaatagcggctgcttcttttccaaggatttatttaatggggatgtgttcaaggcaagaccgaattcagaaggatatcgacgtcgtgatccagaagtccagagctgaggactgcctgtttgcagggcccgcctggcaggacgactgagcaagtccttggaaaaccagagatattagagcggtgaatcgcgctggtcacgttggacacctgcgcgttaggagattctggagccagagggagagaccccagaaactccccggtcggcgacccagcccgagacgcctggggtcccaagggaagctgaacgcccggtgggctcccgggatggttcttccggttctttgtgccgccttcacccagtgaaggagcctgtatccaccctgcccagtcgctgttgggctgctgcggagcttccgctgccatcttcggatcctgtgttccgcccggggctccaccagggcagggatggtggtgagggtcgctcgtgggtcccctggcagggagcagggtctggcactcacaagggcgcacgactaggacttgtcgaatgaatcctttgtcgcctttagcttttagtcctttgaagagaggctctgattgtactttctccacaagcttcagcatggcagtatctctcaccacttgttttggtccaagggcagaaatgagcatcctggaaaccaatcagtacttccgctctgaactggaaaagtgcaaacagaacttccaagacctcacagagaaattcctgacatccaaagctactgcctactccctggccaatcacctgcagaaatatagatacatgatcccttaattcaggctcaggctgaagaactgacccacttacgacagaagatacaggaagggagaggtgtctgctaccttttcacccagcatgtgaagaacacagtcaagtcttttgagggccttctcaggaacactgacattgcctactaccagagacagagattctgtgagcaaatggtacaaggaagccagctgacagagatccttgtcagaaaacttgccacagagtcttgctctcttacccaagctggagtgcagtgacatgatcttggctgactgcaatctgtgcctcctgggctcaagcaatcttcccacctcagcctcccaagtagctgggactacagaatcaaccccaatgctcactaacaaactgagaagaaaaaaaaagaattacccccaacaacatctgaggaagcacaacagggacagacttgaaggcacctgggcagtcctctggttttggagtagagaaaatcacaatggtaagaaaaatgaagacaggcaaaagccactggctcccaggatgcacctctaacctctacaggcaaatcatagattccattgtccagctgtataatgaaaacagagttctcagagaagaataccggagactcccccgacttgcctgaatcaaatttccagaggctgaggaggaggaaatacaggaagtattggtcctgctgttcagagtggcagaggagaaagaaaatcccagccgtgttggaaattcacagagagaatatgaaaatcaggttgtcctgtacagtatctgcaatcagttacgatacagaaataacttaaacatgtcaagaaagatgaacgcggatactatgaggaactgctaaactacagccgagatcatctcatgctgtacccttaccgtctattggatattatggtgaagggcttcagcataacaccattttcatattacactgggattatggagaatattatgaacagtgggcacaattttactgctgctgactgtctaaggcttcttggcataggaagaaaccagtatattgatcttatgattcagtgtagatcatcaaaaaaattcttcagaaggaaaacagccggtgatcttctaccaataaagccagtggaaattgccatagaggcatggtgggtggtgcaggctggatatatcacagaagatgacatcaagatatgcacttggcctgagaaatgtgctactgataagaccgttgattcaggccctcaactctctggatcactagattacaatgtagtacatagtttgtataaaaaaggatttatttatctggatgtaccaatgtctgatgacagttgtatagcagttgcaccccttgaaggttttgtaatgaatcgagtgcttattttgattattttgaaactctactctataagatatttgtttcagtagatgagcacacaaatgtggcagagcttgcaaatgtccttgagattgacttatccctggttaagaatgctgtttcaatgtattgctgattgggctttgcccataagaagggacaagtaataaatttggatcaacttcattcatcatggaagaatgttccatccataaacagattaaagagtaccttagatccatagaagatgctcttgtcatggggtggaggggaaagtaggaggcctgtacaagaagcttcatcggcaactgacactgatacaaatagtcaagaagatccagctgacacagccagtgtaagaagcctgagtctgtctgcaggacacacgaagcacatcgcattcctgtttgactccactcttactgccttcttaatgatgggaaatctttcaccagttcagagcactggtgaaagagaagcacagagatattttgagcatgcgcttactctgagaaacacaacactgtttctgcgtcataacaaagatctagttgtgcaaactgcacagccagaccaacccaattatggttttcctctggatctcttacgctgtgaaagccttcttggtctggaccctgcaactggcagcagagttctaaacaaaaattacacactgcttgtttccatggctcccctcaccaatgaaatccggcctgtcagcagctgcacccctcagcatattggaccagctatcccagaagtcagctctgtctggtttaaacagtacatttacgtttatcatatcactggacaaggaccaccatcccttttattatccaaaggtacaagacctcgaaaactgccagatatatttcagagttacgatcgattgctaataacatcttggggtcatgatcctggagtagttcctacctcaaatgtgctcacgatgttgaatgatgctttaacacattctgcagttttaattcaggagcatggtctgcatgggataggagaaactgtccatgtcccatttccatttgatgaaacagaactacaagaagactcgtgtcaatatgggtgttcataaagcattgcagatactaaggaacagagtggacttacaacatctctgcggatatgtcaccatgttgaatgcttccagccaacttgcaaatagaaaactcagtgatgcttctgatgagagaggaaaacctgatttggcttctggctcagatgttaaatgggagtacagagtcatttgaaatggtcattgaagaagcaactatagattcagcaacaaagcaaacctctggtgccacaacagaagcagattgggttcctctcgagctgtgctttggaattccactgttcagttccgaattaaaccggaaagtatatagaaaaattgctacacatggcctttgcagaaaagagagccttcaaaaacctcttacattccagtagaaaactctctctgcaagtccttaactttgttcactcattccaggaaggtgcttcaacattggatattcacacagagcccagtttttcaagtttgctttcacagtcatcgtttgctgacatgggtgttccacttcctgcaaaaaaatttaacatttaaagatagtgtcttatcagaacggagtggatggtcaccttcctcacttattgctaatctccatttgcaataatttggttacaccatttgctgctcacactttctgccttttttctttcttaacgttagctttatagtgtcagccactaaaaagcatcctgctgctgcggagcaattcttgctttactaatattaaaagtttggggaacatattcatgttttctgaagttttgctccttattgcacatcttattgcaacaaagtgctttttagcatccagcactgtatttttttaccttgagacaatctgcatttcttttataaaactaagtatatactttataggctttatgatgactgttatgtttaaaagcagtcactgtgaaaattgcaatgataattttatatgttagtttatcaaacatcaatcttgtttaactttatattttgttacctatactttgggggatcaagggaagagatggaactcttcctctgaaaatgcttcttggtacttaaagtagtaaaactataaaacagtaaacatccagtattgggagatgatatgatagggcattatgaattcctatgggtatctaaattatgtatgtcagttggacattgtagaaggtatgtaaatcatcatggttatgtataacttaaccttgatttataaggtcttaattcagattatgactattcgttgacatctcatgagaagctttagaaaactttctatttttaaacaccatttatatgtggacttctgttgtcactgactttgggctttatattttcacagagtctttatggaaaaagtagaatttattttccactcttgtagctatagctgctgcacattttcaccctgatttatttttttgtttcttacctttgatgttttcaaaccaaggattgtgattttaggttagaattacatattagaagcattaagactatgtctttggatcagaatgctttagtgattaacctactttgaagacatactcttaagcaatctggatcttaaatttatgtgaatacatttttagaaaatgataaagaaaaatggaattacttcaaagtgtttcttgagtcattgattcttttagcatctcaaatgttaattagaataattggaatcactttttagacttttcaagttacctttcttgggaagtttgtgtagtgttaacagtttagtttagctcctcttatagggcaatggtttgctagtttaaaactgtaaccaaatgaactggtcagacaactcatatctaaaacacttaaaatgttagaacgtttgggaatgttataacctaagcgtttttgctgataactttttgttatttatagacatttgtgtatttaacatacttacttctggaaatatatgcctttcctaaaacttaaccacacatccactaccatggcctatgtatagaattgaatattttggaccatgttatctgtggcacagtcagtgctgtgtttgaggtaaatgcagtaacggttagttttctactttgccttataaaaggtagaaaccatgtgtatgttatgtttgtctataaaagaaaaatactaatattaaattatttcttatgactgtgagtcactcacttatttttccaataattgatattgtacattcttagtgccattaggtatgtatgtatgtaacttttacagtttttcagctgaaagttgtattttttttaatcagggctctttaatctcattttaatttcctttgtttgaatgaactgtagttattttctgtattcctatattaaccatctaaaccaactgtaatgacacgtacactaataaagaattgaacatttgtatttgt

SEQ ID NO: 29 - DNA, 1254 bp, Homo sapiens
ggcacgagggccacccgcgccgcgcccaggtaagcaggtccgtgggtcgctgggtccatgcgtgggtccgtggctggccggggatggaccagcccctccccgcaggggcatcgcctgcccaaggacgcaggacccagtgagggaagcgcgcgctgcaggcacggggctctccaccctcgccatggttggcaccaagccacactgtgcactcgacacacgcagcgtcctggctgccacctgcagattccagctcgtgtctatgcagggccatggccgccatcacagggccatatgcaagaaactctctgagctctcctcgcccaaaaccgcagctatccttttgtggtttggtattataggtaacatgcccttccttaaagaaacagtatttcaggcctgtagtcccagctactccggaggccgaggcagaagctgaggcagaagcaggaggatcatttgagcccagaagtttgagcctgggcaatgtagcaagaccccccccccccacctcactccccaatcagttaaaagagagagagagagagatagaattccagcaggaagaagtacacatttccacgaatggtttgggaattcaagcatcatatggctgaggtttgaactacagctcatgccaataacatgtgcacatgcgccagcattccagcgtccaacagagcatgcgtgcaccattccagcatccggcaacaatgcaccagcattccagcgtccaacagagcatccgtgtaccattccggcatttggcaacaatgcaccagcattccagagtccaacagggcatgcgtgcaccattccagcatccggcaacaatgcaccagcattccagcgtccaacagagcatccgtgtaccattccggcatttggcaacaatgcaccagcattccagagtccaacagggcatgcgtgcaccattccagcatccggcaacaatgcaccagcattccagcgtccaacagagcgtgcgtgcaccattccagcatccggcaacaatgcaccagcattccagcgtccaaaagagcatccggcaacatcccggtgtccagtggcacatgtgcacctggacgttccagtgtggtgagctttcaggcacggagcaaggccaaagggataaaaagatgaaggtgacgcagtactcccccttatagtgcctacaggccttataggccagacagatctggaaataaataattcataataaaaaataattacagaaaaaaaaaaaaaaaaaaaaaa

SEQ ID NO: 30 - DNA, 1326 bp, Homo sapiens
gccgcagcccgaaactggccacggccgggagcggaggggacagcggggatcgtgagctccggcccgggcgagcgggtgcgtctgccgcagagtcggcacctgaaggacatggaggaaagaccggcagagaccaatgccaatgtggacaactcggcgtccccctcggtggcccagctggccgggcggtttagggagcaggcggctgcagccaaggagacaccagccagtaaaccaacccgaaggaaaccgccctgttccctccccctgttcccccccaaggtagacctgggccagaatggtgaggagaaatcaccacccaatgcgagccaccctcctaaattcaaggtcaagagctcgcctctgattgagaagcttcaggccaatttaacctttgacccagctgctctactgcctggggcctcacccaagagtcctggactcaaggctatggtgtcgccatttcacagcccaccttctacccccagcagccctggtgtgcgatctaggcccagcgaggcagaggaggtgcctgtcagcttcgaccagccccctgaaggcagtcatctgccctgttacaacaaggtgcggacgaggggctcaataaaaaggcgccctccctccaggcgattccgaaggtcacagtcagactgtggagaacttggagatttcagggcggtggagtcatctcagcagaacggtgctaaggaagaggatggggatgaagtgttgccatccaagagcaaggccccaggatcccctttgtccagtgagggagcagcgggagagggagtgagaaccctgggacctgctgaaaagcctcctctgaggaggtcacccagcaggacagagaagcaggaggaggacagggccacagaggaagccaagaacggtgaaaaggccaggcggagttcagaggaggtggacggccagcacccggcccaagaggaggtcccggaatcgccccagacctctggcccagaggcagaaaataggtgtgggagccccagggaggaaaagccagctggagaggaagcagagatggaaaaggctacagaggtgaagggggagagggtgcaaaatgaagaggtgggacctgaacatgacagccaagaaacaaagaagctggaggagggagctgcagtgaaggagaccccccacagtccccctggaggagtgaagggcggagatgtccccaagcaggaaaaaggcaaggaaaaacaacaggagggggcagtgctcgagccaggctgcagcccccagaccggccctgcccagctggagaccagcagtgaggtccagagcgagccagcagtccccaagccggag

SEQ ID NO: 31 - protein, 409 aa, Homo sapiens
MDRLKSHLTVCFLPSVPFLILVSTLATAKSVTNSTLNGTNVVLGSVPVIIARTDHIIVKEGNSALINCSVYGIPDPQFKWYNSIGKLLKEEEDEKERGGGKWQMHDSGLLNITKVSFSDRGKYTCVASNIYGTVNNTVTLRVIFTSGDMGVYYMVVCLVAFTIVMVLNITRLCMMSSHLKKTEKAINEFFRTEGAEKLQKAFEIAKRIPIITSAKTLELAKVTQFKTMEFARYIEELARSVPLPPLIMNCRTIMEEIMEVVGLEEQGQNFVRHTPEGQEAADRDEVYTIPNSLKRSDSPAADSDASSLHEQPQQIAIKVSVHPQSKKEHADDQEGGQFEVKDVEETELSAEHSPETAEPSTDVTSTELTSEEPTPVEVPDKVLPPAYLEATEPAVTHDKNTCIIYESHV

SEQ ID NO: 32 - protein, 811 aa, Homo sapiens
MEAARALRLLLVVCGCLALPPLAEPVCPERCDCQHPQHLLCTNRGLRVVPKTSSLPSPHDVLTYSLGGNFITNITAFDFHRLGQLRRLDLQYNQIRSLHPKTFEKLSRLEELYLGNNLLQALAPGTLAPLRKLRILYANGNEISRLSRGSFEGLESLVKLRLDGNALGALPDAVFAPLGNLLYLHLESNRIRFLGKNAFAQLGKLRFLNLSANELQPSLRHAATFAPLRSLSSLILSANSLQHLGPRIFQHLPRLGLLSLRGNQLTHLAPEAFWGLEALRELRLEGNRLSQLPTALLEPLHSLEALDLSGNELSALHPATFGHLGRLRELSLRNNALSALSGDIFAASPALYRLDLDGNGWTCDCRLRGLKRWMGDWHSQGRLLTVFVQCRHPPALRGKYLDYLDDQQLQNGSCADPSPSASLTADRRRQPLPTAAGEEMTPPAGLAEELPPQPQLQQQGRFLAGVAWDGAARELVGNRSALRLSRRGPGLQQPSPSVAAAAGPAPQSLDLHKKPQRGRPTRADPALAEPTPTASPGSAPSPAGDPWQRATKHRLGTEHQERAAQSDGGAGLPPLVSDPCDFNKFILCNLTVEAVGADSASVRWAVREHRSPRPLGGARFRLLFDRFGQQPKFHRFVYLPESSDSATLRELRGDTPYLVCVEGVLGGRVCPVAPRDHCAGLVTLPEAGSRGGVDYQLLTLALLTVNALLVLLALAAWASRWLRRKLRARRKGGAPVHVRHMYSTRRPLRSMGTGVSADFSGFQSHRPRTTVCALSEADLIEFPCDRFMDSAGGGAGGSLRREDRLLQRFAD

SEQ ID NO: 33 - protein, 294 aa, Homo sapiens
MRPRAPACAAAALGLCSLLLLLAPGHACPAGCACTDPHTVDCRDRGLPSVPDPFPLDVRKLLVAGNRIQRIPEDFFIFYGDLVYLDFRNNSLRSLEEGTFSGSAKLVFLDLSYNNLTQLGAGAFRSAGRLVKLSLANNNLVGVHEDAFETLESLQVLELNDNNLRSLSVAALAALPALRSLRLDGNPWLCDCDFAHLFSWIQENASKLPKGLDEIQCSLPMESRRISLRELSEASFSECRFSLSLTDLCIIIFSGVAVSIAAIISSFFLATVVQCLQRCAPNKDAEDEDEDKDD

SEQ ID NO: 34 - protein, 208 aa, Homo sapiens
MLGLLVALLALGLAVFALLDVWYLVRLPCAVLRARLLQPRVRDLLAEQRFPGRVLPSDLDLLLHMNNARYLREADFARVAHLTRCGVLGALRELRAHTVLAASCARHRRSLRLLEPFEVRTRLLGWDDRAFYLEARFVSLRDGFVCALLRFRQHLLGTSPERVVQHLCQRRVEPPELPADLQHWISYNEASSQLLRMESGLSDVTKDQ

SEQ ID NO: 35 - protein, 926 aa, Homo sapiens
MKKTRSTTLRRAWPSSDFSDRASDRMRSRSEKDYRLHKRFPAAFAPQASRGYMTSGDVSPISMSPISQSQFIPLGEILCLAISAMNSARKPVTQEALMEHLTTCFPGVPTPSQEILRHTLNTLVRERKIYPTPDGYFIVTPQTYFITPSLIRTNSKWYHLDERIPDRSQCTSPQPGTITPSASGCVRERTLPRNHCDSCHCCREDVHSTHAPTLQRKSAKDCKDPYCPPSLCQVPPTEKSKSTVNFSYKTETLSKPKDSEKQSKKFGLKLFRLSFKKDKTKQLANFSAQFPPEEWPLRDEDTPATIPREVEMEIIRRINPDLTVENVMRHTALMKKLEEEKAQRSKAGSSAHHSGRSKKSRTHRKSHGKSRSHSKTRVSKGDPSDGSHLDIPAEREYDFCDPLTRVPREGCFIIEHKGDNFIMHSNTNVLESHFPMTPEWDVSGELAKRRTEMPFPEPSRGSSHSKVHRSHSHTQDRRSRNERSNKAKERSRSMDNSKGPLGASSLGTPEDLAEGCSQDDQTPSQSYIDDSTLRPAQTVSLQRAHISSTSYKEVCIPEIVSGSKEPSSACSLLEPGKPPESLPSYGELNSCPTKTATDDYFQCNTSSETVLTAPSPLGKNKEDHDTLTLAEGVKKLSPSDRQVPHSSREPVGHKEESPKGPGGGPAASGGVAEGIANGRLVQHHGAEPSSLDKRKEIFSKDTLFKPLHSTLSVNSYHKSSLSLLKSHPKTPADTLPGRCEKLEPSLGTSAAQAMPASQRQQESGGNQEASFDYYNVSDDDDSEEGANKNTEEEKNREDVGTMQWLLEREKERDLQRKFEKNLTLLAPKETDSSSNQRATHSARLDSMDSSSITVDSGFNSPRTRESLASNTSSIVESNRRQNPALSPAHGGAGPAFNFRASAEPPTNEAEKLQKPSNCLQASVTSV

SEQ ID NO: 36 - protein, 94 aa, Homo sapiens
MIITCVFICSLLHSGCSWSQGLRIIFSDASRLIFRLSSSSGVRATLRLYAESYERDPSGHDQEPQAVLSPLIAIALKISQIHERTGRRGPTVIT

SEQ ID NO: 37 - protein, 400 aa, Homo sapiens
MTYGTFNFLGGRLMIPNTGISLLIPPDAIPRGKIYEIYLTLHKPEDVRLPLAGCQTLLSPIVSCGPPGVLLTRPVILAMDHCGEPSPDSWSLRLKKQSCEGSWEDVLHLGEEAPSHLYYCQLEASACYVFTEQLGRFALVGEALSVAAAKRLKLLLFAPVACTSLEYNIRVYCLHDTHDALKEVVQLEKQLGGQLIQEPRVLHFKDSYHNLRLSIHDVPSSLWKSKLLVSYQEIPFYHIWNGTQRYLHCTFTLERVSPSTSDLACKLWVWQVEGDGQSFSINFNITKDTRFAELLALESEAGVPALVGPSAFKIPFLIRQKIISSLDPPCRRGADWRTLAQKLHLDSHLSFFASKPSPTAMILNLWEARHFPNGNLSQLAAAVAGLGQPDAGLFTVSEAE

SEQ ID NO: 38 - protein, 106 aa, Homo sapiens
MEKATEVKGERVQNEEVGPEHDSQETKKLEEGAAVKETPHSPPGGVKGGDVPKQEKGKEKQQEGAVLEPGCSPQTGPAQLETSSEVQSEPAVPKPEDDTPVQDTKM

SEQ ID NO: 39 - protein, 366 aa, Homo sapiens
MYLLINKAESTLPLSEGTQTVLSPSVTCGPTGLLLCRPVILTMPHCAEVSARDWIFQLKTQAHQGHWEEVVTLDEETLNTPCYCQLEPRACHILLDQLGTYVFTGESYSRSAVKRLQLAVFAPALCTSLEYSLRVYCLEDTPVALKEVLELERTLGGYLVEEPKPLMFKDSYHNLRLSLHDLPHAHWRSKLLAKYQEIPFYHIWSGSQKALHCTFTLERHSLASTELTCKICVRQVEGEGQIFQLHTTLAETPAGSLDTLCSAPGSTVTTQLGPYAFKIPLSIRQKICNSLDAPNSRGNDWRMLAQKLSMDRYLNYFATKASPTGVILDLWEALQQDDGDLNSLASALEEMGKSEMLVAVATDGDC

SEQ ID NO: 40 - protein, 1534 aa, Homo sapiens
ASGNLDKNARFSAIYRQDSNKLSNDDMLKLLADFRKPEKMAKLPVILGNLDITIDNVSSDFPNYVNSSYIPTKQFETCSKTPITFEVEEFVPCIPKHTQPYTIYTNHLYVYPKYLKYDSQKSFAKARNIAICIEFKDSDEEDSQPLKCIYGRPGGPVFTRSAFAAVLHHHQNPEFYDEIKIELPTQLHEKHHLLLTFFHVSCDNSSKGSTKKRDVVETQVGYSWLPLLKDGRVVTSEQHIPVSANLPSGYLGYQELGMGRHYGPEIKWVDGGKPLLKISTHLVSTVYTQDQHLHNFFQYCQKTESGAQALGNELVKYLKSLHAMEGHVMIAFLPTILNQLFRVLTRATQEEVAVNVTRVIIHVVAQCHEEGLESHLRSYVKYAYKAEPYVASEYKTVHEELTKSMTTILKPSADFLTSNKLLKYSWFFFDVLIKSMAQHLIENSKVKLLRNQRFPASYHHAVETVVNMLMPHITQKFRDNPEASKNANHSLAVFIKRCFTFMDRGFVFKQINNYISCFAPGDPKTLFEYKFEFLRVVCNHEHYIPLNLPMPFGKGRIQRYQDLQLDYSLTDEFCRNHFLVGLLLREVGTALQEFREVRLIAISVLKNLLIKHSFDDRYASRSHQARIATLYLPLFGLLIENVQRINVRDVSPFPVNAGMTVKDESLALPAVNPLVTPQKGSTLDNSLHKDLLGAISGIASPYTTSTPNINSVRNADSRGSLISTDSGNSLPERNSEKSNSLDKHQQSSTLGNSVVRCDKLDQSEIKSLLMCFLYILKSMSDDALFTYWNKASTSELMDFFTISEVCLHQFQYMGKRYIARTGMMHARLQQLGSLDNSLTFNHSYGHSDADVLHQSLLEANIATEVCLTALDTLSLFTLAFKNQLLADHGHNPLMKKVFDVYLCFLQKHQSETALKNVFTALRSLIYKFPSTFYEGRADMCAALCYEILKCCNSKLSSIRTEASQLLYFLMRNNFDYTGKKSFVRTHLQVIISVSQLIADVVGIGGTRFQQSLSIINNCANSDRLIKHTSFSSDVKDLTKRIRTVLMATAQMKEHENDPEMLVDLQYSLAKSYASTPELRKTWLDSMARIHVKNGDLSEAAMCYVHVTALVAEYLTRKEAVQWEPPLLPHSHSACLRRSRGGVFRQGCTAFRVITPNIDEEASMMEDVGMQDVHFNEDVLMELLEQCADGLWKAERYELIADIYKLIIPIYEKRRDFERLAHLYDTLHRAYSKVTEVMHSGRRLLGTYFRVAFFGQAAQYQFTDSETDVEGFFEDEDGKEYIYKEPKLTPLSEISQRLLKLYSDKFGSENVKMIQDSGKVNPKDLDSKYAYIQVTHVIPFFDEKELQERKTEFERSHNIRRFMFEMPFTQTGKRQGGVEEQCKRRTILTAIHCFPYVKKRIPVMYQHHTDLNPIEVAIDEMSKKVAELRQLCSSAEVDMIKLQLKLQGSVSVQVNAGPLAYARAFLDDTNTKRYPDNKVKLLKEVFRQFVEACGQALAVNERLIKEDQLEYQEEMKANYREMAKELSEIMHEQLG

SEQ ID NO: 41 - protein, 132 aa, Homo sapiens
MIMDRLYGGVCYAGIDTDPELKYPKGAGRVAFSNQQSYIAAISARFVQLQHGDIDKRVEVKPYVLDDQMCDECQGARCGGKFAPFFCANVTCLQYYCEFCWANIHSRAGREFHKPLVKEGADRPRQIHFRWN

SEQ ID NO: 42 - protein, 504 aa, Homo sapiens
MEAAATPAAAGAARREELDMDVMRPLINEQNFDGTSDEEHEQELLPVQKHYQLDDQEGISFVQTLMHLLKGNIGTGLLGLPLAIKNAGIVLGPISLVFIGIISVHCMHILVRCSHFLCLRFKKSTLGYSDTVSFAMEVSPWSCLQKQAAWGRSVVDFFLVITQLGFCSVYIVFLAENVKQVHEGFLESKVFISNSTNSSNPCERRSVDLRIYMLCFLPFIILLVFIRELKNLFVLSFLANVSMAVSLVIIYQYVVRNMPDPHNLPIVAGWKKYPLFFGTAVFAFEGIGVVLPLENQMKESKRFPQALNIGMGIVTTLYVTLATLGYMCFHDEIKGSITLNLPQDVWLYQSVKILYSFGIFVTYSIQFYVPAEIIIPGITSKFHTKWKQICEFGIRSFLVSITCAGAILIPRLDIVISFVGAVSSSTLALILPPLVEILTFSKEHYNIWMVLKNISIAFTGVVGFLLGTYITVEEIIYPTPKVVAGTPQSPFLNLNSTCLTSGLK

SEQ ID NO: 43 - protein, 165 aa, Homo sapiens
MCTCASIPASNRACVHHSSIRQQCTSIPASNRASVYHSGIWQQCTSIPESNRACVHHSSIRQQCTSIPASNRASVYHSGIWQQCTSIPESNRACVHHSSIRQQCTSIPASNRACVHHSSIRQQCTSIPASKRASGNIPVSSGTCAPGRSSVVSFQARSKAKGIKR

SEQ ID NO: 44 - protein, 442 aa, Homo sapiens
AAARNWPRPGAEGTAGIVSSGPGERVRLPQSRHLKDMEERPAETNANVDNSASPSVAQLAGRFREQAAAAKETPASKPTRRKPPCSLPLFPPKVDLGQNGEEKSPPNASHPPKFKVKSSPLIEKLQANLTFDPAALLPGASPKSPGLKAMVSPFHSPPSTPSSPGVRSRPSEAEEVPVSFDQPPEGSHLPCYNKVRTRGSIKRRPPSRRFRRSQSDCGELGDFRAVESSQQNGAKEEDGDEVLPSKSKAPGSPLSSEGAAGEGVRTLGPAEKPPLRRSPSRTEKQEEDRATEEAKNGEKARRSSEEVDGQHPAQEEVPESPQTSGPEAENRCGSPREEKPAGEEAEMEKATEVKGERVQNEEVGPEHDSQETKKLEEGAAVKETPHSPPGGVKGGDVPKQEKGKEKQQEGAVLEPGCSPQTGPAQLETSSEVQSEPAVPKPE

SEQ ID NO: 45 - DNA, 2066 bp, Homo sapiens
aaacgcgggatctcccagggaagctcggagggggacagggagctggttcccctctgcgactcgcccctctctggctggccgagtgtctggcgccaacctcgctggaggaggctgtcgggggcgggccagccagcggggctgccctcctcgcagtgacgtcccagggggcggaggggcgaccgactgactccgcgccctcccccccgcctcccgtgcggtccgtcggtggcctagagatgctgctgccgcggttgcagttgtcgcgcacgcctctgcccgccagcccgctccaccgccgtagcgcccgagtgtcggggggcgcacccgagtcgggccatgaggccgggaaccgcgctacaggccgtgctgctggccgtgctgctggtggggctgcgggccgcgacgggtcgcctgctgagtgggcagccagtctgccggggagggacacagaggccttgttataaagtcatttacttccatgatacttctcgaagactgaactttgaggaagccaaagaagcctgcaggagggatggaggccagctagtcagcatcgagtctgaagatgaacagaaactgatagaaaagttcattgaaaacctcttgccatctgatggtgacttctggattgggctcaggaggcgtgaggagaaacaaagcaatagcacagcctgccaggacctttatgcttggactgatggcagcatatcacaatttaggaactggtatgtggatgagccatcctgcggcagcgaggtctgcgtggtcatgtaccatcagccatcggcacccgctggcatcggaggcccctacatgttccagtggaatgatgaccggtgcaacatgaagaacaatttcatttgcaaatattctgatgagaaaccagcagttccttctagagaagctgaaggtgaggaaacagagctgacaacacctgtacttccagaagaaacacaggaagaagatgccaaaaaaacatttaaagaaagtagagaagctgccttgaatctggcctacatcctaatccccagcattccccttctcctcctccttgtggtcaccacagttgtatgttgggtttggatctgtagaaaaagaaaacgggagcagccagaccctagcacaaagaagcaacacaccatctggccctctcctcaccagggaaacagcccggacctagaggtctacaatgtcataagaaaacaaagcgaagctgacttagctgagacccggccagacctgaagaatatttcattccgagtgtgttcgggagaagccactcccgatgacatgtcttgtgactatgacaacatggctgtgaacccatcagaaagtgggtttgtgactctggtgagcgtggagagtggatttgtgaccaatgacatttatgagttctccccagaccaaatggggaggagtaaggagtctggatgggtggaaaatgaaatatatggttattaggacatataaaaaactgaaactgacaacaatggaaaagaaatgataagcaaaatcctcttattttctataaggaaaatacacagaaggtctatgaacaagcttagatcaggtcctgtggatgagcatgtggtccccacgacctcctgttggacccccacgttttggctgtatcctttatcccagccagtcatccagctcgaccttatgagaaggtaccttgcccaggtctggcacatagtagagtctcaataaatgtcacttggttggttgtatctaacttttaagggacagagctttacctggcagtgataaagatgggctgtggagcttggaaaaccacctctgttttccttgctctatacagcagcacatattatcatacagacagaaaatccagaatcttttcaaagcccacatatggtagcacaggctggcctgtgcatcggcaattctcatatctgtttttttcaaagaataataaaatcaaataaagagcaggaaacagagtgttagtctgtgtctacagcccttcctctgcatgtggccacaggggacctttttttgtttctcctgacatccagacttggaaatatctaactacttgc

SEQ ID NO: 46 - protein, 374 aa, Homo sapiens
MRPGTALQAVLLAVLLVGLRAATGRLLSGQPVCRGGTQRPCYKVIYFHDTSRRLNFEEAKEACRRDGGQLVSIESEDEQKLIEKFIENLLPSDGDFWIGLRRREEKQSNSTACQDLYAWTDGSISQFRNWYVDEPSCGSEVCVVMYHQPSAPAGIGGPYMFQWNDDRCNMKNNFICKYSDEKPAVPSREAEGEETELTTPVLPEETQEEDAKKTFKESREAALNLAYILIPSIPLLLLLVVTTVVCWVWICRKRKREQPDPSTKKQHTIWPSPHQGNSPDLEVYNVIRKQSEADLAETRPDLKNISFRVCSGEATPDDMSCDYDNMAVNPSESGFVTLVSVESGFVTNDIYEFSPDQMGRSKESGWVENEIYGY

SEQ ID NO: 47 - DNA, 4585 bp, Homo sapiens
  KIAA0062
ggggggtcggcgcgcgtgtctacgcggacgcaccggctaagctgcttctgccgccgccggccgcctgggaccttgcggtgaggctgcgcggggccgaggccgcctccgagcgccaggtttattcagtcaccatgaagctgctgctgctgcacccggccttccagagctgcctcctgctgaccctgcttggcttatggagaaccacccctgaggctcacgcttcatccctgggtgcaccagctatcagcgctgcctccttcctgcaggatctaatacatcggtatggcgagggtgacagcctcactctgcagcagctgaaggccctactcaaccacctggatgtgggagtgggccggggtaatgtcacccagcacgtgcaaggacacaggaacctctccacgtgctttagttctggagacctcttcactgcccacaatttcagcgagcagtcgcggattgggagcagcgagctccaggagttctgccccaccatcctccagcagctggattcccgggcctgcacctcggagaaccaggaaaacgaggagaatgagcagacggaggaggggcggccaagcgctgttgaagtgtggggatacggtctcctctgtgtgaccgtcatctccctctgctccctcctgggggccagcgtggtgcccttcatgaagaagaccttttacaagaggctgctgctctacttcatagctctggcgattggaaccctctactccaacgccctcttccagctcatcccggaggcatttggtttcaaccctctggaagattattatgtctccaagtctgcagtggtgtttgggggcttttatcttttctttttcacagagaagatcttgaagattcttcttaagcagaaaaatgagcatcatcatggacacagccattatgcctctgagtcgcttccctccaagaaggaccaggaggagggggtgatggagaagctgcagaacggggacctggaccacatgattcctcagcactgcagcagtgagctggacggcaaggcgcccatggtggacgagaaggtcattgtgggctcgctctctgtgcaggacctgcaggcttcccagagtgcttgctactggctgaaaggtgtccgctactctgatatcggcactctggcctggatgatcactctgagcgacggcctccataatttcatcgatggcctggccatcggtgcttccttcactgtgtcagttttccaaggcatcagcacctcggtggccatcctctgtgaggagttcccacatgagctaggagactttgtcatcctgctcaacgctgggatgagcatccaacaagctctcttcttcaacttcctttctgcctgctgctgctacctgggtctggcctttggcatcctggccggcagccacttctctgccaactggatttttgcgctagctggaggaatgttcttgtatatttctctggctgatatgttccctgagatgaatgaggtctgtcaagaggatgaaaggaagggcagcatcttgattccatttatcatccagaacctgggcctcctgactggattcaccatcatggtggtcctcaccatgtattcaggacagatccagattgggtagggctctgccaagagcctgtgggactggaagtcgggccctgggctgcccgatcgccagcccgaggacttaccatccacaatgcaccacggaagaggccgttctatgaaaaactgacacagactgtattcctgcattcaaatgtcagccgtttgtaaaatgctgtatcctaggaataagctgccctggtaaccagtctctagctagtgcctcttgccctctcctcacctccttttctctcagtgactctggaacctgaatgcagcttacaagacaagcctgacttttttctctgattaccttggcctcctcttggaaccagtgctgaaaggttttgaatcctttacccaacaatgcaaaaatagagccaatggttataacttggctagaaatatcaagagttgaatccatagtgtggggcccatgactctagctgggcaccttggacctccagctggccaatagaagagacaggagacaggaagccttcccattttttcaaagtctgtttaattgcctattacttctctcaaagagaacctgaagtcagaacacatgagcagggtgagaggtgaggcaaggttcatcctgaatgggagaggaagtcgaaccactgctgtgtgtcttgtcaggatgctcacttgttcctactgagatgctggatattgattttgtaacagcacctggtgtttcacggctgtccgagtgagctaacgtggcggtgtggctgcctggacctcctctttcaggttaacgctgacagaatggaggctcaggctgtctgcaagaaaacagttggtttggctgtgattttgacctcctcttccccactgccatcttctaagagactttgtagctgcctcctagaagcacattctgagcacatttgagacctctgtgttagaggggagactgcacaaactatcctcccccaggttgagacgtctgcagagtggcaagctgacttgtagaaatggggtgccatttatgctctacttagacaagggtaatcagaaatggaatcagtgcaggcaaaatttaggatttgccgcttccataaatcaaagcatgactaatagggggtctctgaaatgtaagggcacaaacttcacttagggcatcgcagatgtttgcagaatggttggcctaatgattatgctacagatgggttttaaatgacccgtctaggttactgcttccttgcaaaaaaagtcgaatcctgcattgaattgaatatgaatttctctaactctctccagaaaatggatggagataacttgtctttaaaactgtaggccagccttagccactgtggagcccttgcctccgagctctggcttcaaggggagctcttctccaggttcactaggtgaattgatttattattatcatattgataatgtgagattctttagccactttggggagcctgtctctccagaagcctttcttagtggtgcccacagttggagcccaggggccatgtttgcaaactgattcatgtgcatggctgacaggagtactggttcactaccaatgcctgagcttttctcttacatagaaaaactgtccgctctcagtaatcacaagcagcatccgttttgttttctcttcttgggagacatctgtcaaaccaggaatattcttgaaaagaacgtgagcaggaaaaactgctggtgatactttttttaagttttgtttttatcttgcctgttggcttcaatacatttgagaatacgctgaagagggaaaatttcagtgatggagattctagattaaatatcaggactgatttcctggtgggattatggtccagttttaccaaagaaccaattccttgaatgttggaatctaactttttatattgtcattattattgttgtttttaaacggttctttgtcttttctgttttatttttctcaagctgctttcaggagctagcagaaaataactcaaagttgaagactctggaagattttgctttaacctaactcgcattgatgtattaaatttataattttagcattcccaatagatcctatcattccttaaacataataccctttgtcttggagtagaatactaagttagagttagtggatttctagtttaggagaggagctcaaaactataatctttaacaaattgaaaaatgaaatagggtgttttccctttttgtgcacacctatattaccttaagaaatttccttccatagacagctgcctcaaagggaaatcctctttaaaccgtagttggcgcagaggtcagtcctagtcggagcttaggaggggcggagacgctcacatcgtctgacttgagtcgccactgattgtggcaacagctttgcctcatgagtcaaaaattggcaatttcttttgatttttagttgttgaatttgctgtttcaagcatttgtacatattagaagtctaaggagtagcaagtcagtgggaggactttttcacccctggcattagcagcttcgacctcattttccagatgcaccagctcctattaataagttagcaaggaaagtgtatgtcacgtgcaggaacagtgaggcagggacaggggttctgctccttctcacttcaccaccggcacacagcttgcccctgtctttgcccccaaaggtattttgtgtctagtgtcaaattggagctattcttcactggtccttaaccttgggttttaaaaagaaggcttctctgtttgggtagcgtaagagctgagtatagtaagtcctcttccaaagagatggcaatatgctgggcatctactttaaaacaaagttgtctgatttttgcaagagaggttaggattttattgttcttatttccctttacagttctgcagttccatcacagtatttttttaaataactcaggtgtatgagaagaaattagaaaagaaaattaacttatgtggactgtaaatgttttatttgtaagattctataaataaagctatattctgt

SEQ ID NO: 48 - protein, 492 aa, Homo sapiens
  KIAA0062
MKLLLLHPAFQSCLLLTLLGLWRTTPEAHASSLGAPAISAASFLQDLIHRYGEGDSLTLQQLKALLNHLDVGVGRGNVTQHVQGHRNLSTCFSSGDLFTAHNFSEQSRIGSSELQEFCPTILQQLDSRACTSENQENEENEQTEEGRPSAVEVWGYGLLCVTVISLCSLLGASVVPFMKKTFYKRLLLYFIALAIGTLYSNALFQLIPEAFGFNPLEDYYVSKSAVVFGGFYLFFFTEKILKILLKQKNEHHHGHSHYASESLPSKKDQEEGVMEKLQNGDLDHMIPQHCSSELDGKAPMVDEKVIVGSLSVQDLQASQSACYWLKGVRYSDIGTLAWMITLSDGLHNFIDGLAIGASFTVSVFQGISTSVAILCEEFPHELGDFVILLNAGMSIQQALFFNFLSACCCYLGLAFGILAGSHFSANWIFALAGGMFLYISLADMFPEMNEVCQEDERKGSILIPFIIQNLGLLTGFTIMVVLTMYSGQIQIG

SEQ ID NO: 49 - DNA, 5857 bp, Homo sapiens
  KIAA0582
agggcgtggtcagcgcggccgaagggcgtggttggcgctcggtcctgccctgcgcgttttgggctgcggttggagggccgcagttgcagtcagggtccgccagctcggggccagcgcatggggctgctgagaccgctccggacgtgcgaagcgttcgcggtgcggtaggaagctgaagtcttcagcagaaccctgacctaggtagggagtctcaatggccctgggtgaagaaaaggcagaagcggaagcatctgaagacacaaaggcccagtcctatgggagagggagctgcagggagcgggagctggacatcccagggcccatgagtggggagcagcccccacgcctggaagctgagggagggctcatctcccctgtatggggggcagaagggatacctgcccctacttgctggattgggactgaccctggcggcccctctagagcccaccagccacaggccagtgatgccaacagagagcccgtagctgagaggtctgagcctgcactcagtggcctgcctcctgccaccatggggtctggagaccttctgctctccggggaaagccaggtggagaagaccaagctttcttcctccgaggagttccctcagactctgagccttcccagaacaacaactatttgctcaggacatgatgctgataccgaagatgatccatccctagcagatttgccccaggcactggacctcagccagcagcctcacagctcaggtctctcttgcctgtcacagtggaagtccgtgctgagcccaggttccgcagctcagccttccagctgcagcatctctgcttcctccacaggcagcagtctccagggtcaccaggagagggcggagcctcgtggtggttctctggccaaggtctcctcctccctggagccggtcgtcccccaggaaccttcctctgtggtggggctaggacctcggccccagtggtcaccacagcctgtgttctctgggggtgatgcttctgggctaggcaggagacgcctctccttccaggctgagtactgggcctgtgtgctgccagattccctgcctccatcacccgaccgccactcccctctctggaacccaaataaagagtatgaagatctgcttgactatacttacccactgaggcccgggcctcagctcccaaagcaccttgatagccgtgtgccagctgaccctgtcctgcaggactccggggtagacctggatagcttctctgtctctccagcaagcaccctcaaatcacctactaatgtctcccccaactgcccaccagcagaggccactgccctgccattttctgggcccagagagccaagccttaagcagtggccctccagagtaccccagaaacagggtggcatgggcttggcatcttggagccaacttgcatctacccccagagccccaggcagtagggatgctcgttgggagcgcagagagccagccctgaggggtgcgaaggaccggctgactataggcaagcaccttgatatgggctctccccagctaaggacacgggacagagggtggccctcgcccaggccagagagggagaagaggaccagccagagtgcccggcgccctacctgcacagagtctaggtggaaatcagaagaggaagtggaaagtgatgacgagtatcttgccctccccgctcggctgacacaggtttctagcctggtttcgtatctaggatccatttctaccttggttaccctgcccactggggatatcaaagggcagagccccttggaagtgtcagacagtgatgggccagcttccttcccttcaagctccagccaaagccagcttccccctggagctgccctccaaggatctggggatcctgagggccagaatccctgtttcctgcgctccttcgtccgtgcccacgactccgcaggggaaggcagtctggggagcagccaggccctcggggtctcctctggactgctgaaaacacgcccctccttgccagctaggttggaccggtggccattctcagacccagatgttgaagggcagcttcccaggaaaggaggagaacagggaaaagaatcactggtgcaatgtgtgaagacattttgctgtcagctggaagagctgatctgctggctgtataatgttgcagatgttactgaccacgggactgcagccaggtccaatcttacaagtctcaagtcttctctgcagctttaccggcaatttaagaaagatatagatgaacatcagtctctgacggagagtgtcttacagaagggggagattcttcttcagtgcctgttggagaacaccccagttttagaggatgtccttgggaggatcgcaaagcagtctggtgagctggagagccacgcagatcgcctgtatgactctatcttggcctctctggacatgctggctggctgcacccttatccctgacaaaaagcccatggcggcaatggagcacccatgtgaaggggtttaacctggcatcttctcaggcagaggtgcaacctgtcggccaaacactggctagtgagaaaaaatccttcaagaagtccttgcaagagccattcaacactgaagtcaagggggaaaccttcaatatactagctttaaaatgcctttctcctccctgaatggagggctgagttactatttttatttacaatgaatccttccaaactaaggttttccttttggtgcttctccacaaagagcgtgtagctttgcaatttttgataaaataagacgtgttgccttcccctctatcccattaaaaaagagcagataaagctcaaactattccacctggtagggtcatttaccaagggctggtaggagattccgaatactcaatattctcaggcatgcaagaggacctaagagactgaaaaaagtgaattgttggccagaaaccttgggtcttttcataaaggaaatttgggcttgtcaatccctctttaaagatataggtagaaagaagagatttttaaccctttgtctgcaaaagaaaaagggttaaatgaagcatctatacagatgactttgggagattatgacaccttttgccatcttcagggcttacgtctttactttcttggctaaccagtttcttagaagaaaatgtgtcagggacttggggatctacagtcatgctttagcatggctatggagctaattatcaagcttaaagggtaactttgggaggactcctcccttcactcctagtctcccttggaagagcagtccaggctcagggaagggaatggataggatgacacagtaagtacagaaactgaagctgtcaatagtgaaggaaaaaggggaattcttcgttgctttggcattgacacataagtactttgattaaaaaaaaaaaaaactatggatcaaccattcaaagcatcaattctatagctttttgcagcaagatgatcagttattgctggtaactgcagattctacagaaaagcacttttaaagttctgttgggccatgaatgaacctggaaggaggaaagcacagtaacaatggaaactaaagtcctattattaatgtgacttttctgcttcagaatttctgagactttatagtcactggaaaatagccattaaattctttaaagattagctcttcaacagtagctacacataaaatgcagtatttcaagtgcctgatgctgctgtggtatgctttatcataatgcttaagggcatgatcaaaattaaaatggcttatgagtttgccatattaatcatcttagttccatacacactgagactttaaaagggaaaaaccactctagcaaataattgtcaattataaacctgtatgtaaaacattcttgaaaacctagagttggttaaaaaggtagagatgtctgacggcctcttcttaaattgatatattttaccttctcttagatgtatatttataagtaggaacatgtccttccactgagtatgttactgaatagcccttaggaaattaaacccatttatttactaatatttgacaggcatagaagtgtattaattagcataaaagttggagatgaaaaccctatagaaacaaattggccaatattatactaattgaatgcagaatgtggcattctattcccattcaactaataatcagcttcaactgacaggaatttgcacagaatgttacacaataccctgtttcccaagaaagtactaccttacctagagatgatctaagatatttttgttcatcctctgaataaggtgagactaaagggtgctaactccctggacctggctgtgaatgctactgaagagtatcaacacaactgttaattataccgccgtgctttaagtttaagacttaccttaaaactcaagctgaaggctgggcacggtggctcatgcctgtaatcccagcactttgggaggccgaggcgggtggatcacaaggtcaggagatcgagaccatcctggctaacacggtgaaaccccatctctactaaaaatacaaaaagaaattagccaggcgtggtgatgggcgcctgtagtcccagctacttgggaggctgaggcatgagaatggcatgaacccgggaggcggagcttgcagtgagctgagatggcaccactgcactccagcctgggcaacagagtgagactcttgtctcaaaaaaaaaaaatcaagctgaaattgtttcagcctagtaagatgctgccagcagcatttctatgagcaaacatggccaaattagagtcaagtagctgagcttgctaactgcactgtgatgccacactggaataacttagtagtcccttaaaattaatggaagttaaatccacagggaagtgatgatactcaaagctggatcagcagtttcaagatctgggttcttggagatccataggtaagctcagcaaatggaagacgacgtcaacacagggctattttgaagcttaggtgggaatggaacacaaagaaggtttgaggtaagatatgctggaaaggcaagatgtaggctaagggaaattcaatccaaggtcgaagaataggaaattactgctcagaccacaatgactatcattctgaaaggatttcacagagtgtgcagctgcttagatttaagaacactcttcttcactatgtaaactaatttatggcagcaccttatatttagaacaagtggtaattccctttactaagtgaacagattattaaaacctgtagtagctttgaaccgtttgtacttgaaaatgggggtataaaggggtatatattttttccagaaccacatttattggcgtatacatagaagcaaatcttaaggcatgctgaaatttgttgtaaatcccaatctttactgccatggggaaaagaacgctggaattttccaaacttaagtctgtaaatatgctcatcttaagttcatgtaatgtttccgctaactcaccaagaataagctgacaatttaaacaacttttactgtgtaaaaatgaagtgcacggcatggcatcacagtatcttgacatttgttttgtgtcatttagctactttagaaaatagtttctgaactctttccccctttatactgtattaaggcaaaaacaaaacttctgaagcattaaagatcttcaccaaaataactattggtaacttcaggaatttgtcagttgccttatgtgaggatgaatagatccaccaagcacgcctataatacaaagtaaactatgatttttattgtgaaattttcatagatggaaaattgaatattctgtccatttcattttacaattatcttaccacttatttttgtaccatgtatttcaattgcctgtttagtgaaaaataaaaattaaaaaaacct

SEQ ID NO: 50 - protein, 760 aa, Homo sapiens
  KIAA0582
GVSMALGEEKAEAEASEDTKAQSYGRGSCRERELDIPGPMSGEQPPRLEAEGGLISPVWGAEGIPAPTCWIGTDPGGPSRAHQPQASDANREPVAERSEPALSGLPPATMGSGDLLLSGESQVEKTKLSSSEEFPQTLSLPRTTTICSGHDADTEDDPSLADLPQALDLSQQPHSSGLSCLSQWKSVLSPGSAAQPSSCSISASSTGSSLQGHQERAEPRGGSLAKVSSSLEPVVPQEPSSVVGLGPRPQWSPQPVFSGGDASGLGRRRLSFQAEYWACVLPDSLPPSPDRHSPLWNPNKEYEDLLDYTYPLRPGPQLPKHLDSRVPADPVLQDSGVDLDSFSVSPASTLKSPTNVSPNCPPAEATALPFSGPREPSLKQWPSRVPQKQGGMGLASWSQLASTPRAPGSRDARWERREPALRGAKDRLTIGKHLDMGSPQLRTRDRGWPSPRPEREKRTSQSARRPTCTESRWKSEEEVESDDEYLALPARLTQVSSLVSYLGSISTLVTLPTGDIKGQSPLEVSDSDGPASFPSSSSQSQLPPGAALQGSGDPEGQNPCFLRSFVRAHDSAGEGSLGSSQALGVSSGLLKTRPSLPARLDRWPFSDPDVEGQLPRKGGEQGKESLVQCVKTFCCQLEELICWLYNVADVTDHGTAARSNLTSLKSSLQLYRQFKKDIDEHQSLTESVLQKGEILLQCLLENTPVLEDVLGRIAKQSGELESHADRLYDSILASLDMLAGCTLIPDKKPMAAMEHPCEGV

SEQ ID NO: 51 - DNA, 888 bp, Homo sapiens
  KIAA101
ggggccttgtccagtgaaacaccctcggctgggaagtcagttcgttctctcctctcctctcttcttgtttgaacatggtgcggactaaagcagacagtgttccaggcacttacagaaaagtggtggctgctcgagcccccagaaaggtgcttggttcttccacctctgccactaattcgacatcagtttcatcgaggaaagctgaaaataaatatgcaggagggaaccccgtttgcgtgcgcccaactcccaagtggcaaaaaggaattggagaattctttaggttgtcccctaaagattctgaaaaagagaatcagattcctgaagaggcaggaagcagtggcttaggaaaagcaaagagaaaagcatgtcctttgcaacctgatcacacaaatgatgaaaaagaatagaactttctcattcatctttgaataacgtctccttgtttaccctggtattctagaatgtaaatttacataaatgtgtttgttccaattagctttgttgaacaggcatttaattaaaaaatttaggtttaaatttagatgttcaaaagtagttgtgaaatttgagaatttgtaagactaattatggtaacttagcttagtattcaatataatgcattgtttggtttcttttaccaaattaagtgtctagttcttgctaaaatcaagtcattgcattgtgttctaattacaagtatgttgtatttgagatttgcttagattgttgtactgctgccatttttattggtgtttgattattggaatggtgccatattgtcactccttctacttgctttaaaaagcagagttagatttttgcacattaaaaaaattcagtattaattaaacactaaaaaaaaaaaaaaaaaaaaaaaaaaaaaaa

SEQ ID NO: 52 - protein, 111 aa, Homo sapiens
  KIAA101
MVRTKADSVPGTYRKVVAARAPRKVLGSSTSATNSTSVSSRKAENKYAGGNPVCVRPTPKWQKGIGEFFRLSPKDSEKENQIPEEAGSSGLGKAKRKACPLQPDHTNDEKE

SEQ ID NO: 53 - DNA, 1339 bp, Homo sapiens
  Human Sox-18
gggaggaagcgctgcagggaccaccgccgtccccaccgccatccgccctcccggcctggcctgcccttgcgcccggctccccagtgcccgccgcccgcccgccgcgctcccgcgctccgttccgcccaggccgcgcccagctggaatgcagagatcgccgcccggctacggcgcacaggacgacccgcccgcccgccgcgactgtgcatgggccccgggacacggggccgccgctgacacgcgcggcctcgccgccggccccgccgccctcgccgcgcccgccgcgcccgcctcgccgcccagcccgcagcgcagtcccccgcgcagccccgagccggggcgctatggcctcagcccggccggccgcggggaacgccaggcggcagacgagtcgcgcatccggcggcccatgaacgccttcatggtgtgggcaaaggacgagcgcaagcggctggctcagcagaacccggacctgcacaacgcggtgctcagcaagatgctgggcaaagcgtggaaggagctgaacgcggcggagaagcggcccttcgtggaggaagccgaacggctgcgcgtgcagcacttgcgcgaccaccccaactacaagtaccggccgcgccgcaagaagcaggcgcgcaaggcccggcggctggagcccggcctcctgctcccgggattagcgcccccgcagccaccgcccgagcctttccccgcggcgtctggctcggctcgcgccttccgcgagctgcccccgctgggcgccgagttcgacggcctggggctgcccacgcccgagcgctcgcctctggacggcctggagcccggcgaggctgccttcttcccaccgcccgcggcgcccgaggactgcgcgctgcggcccttccgcgcgccctacgcgcccaccgagttgtcgcgggaccccggcggttgctacggggctcccctggcggaggcgctcaggaccgcgccccccgcggcgccgctcgctggcctgtactacggcaccctgggcacgcccggcccgtaccccggcccgctgtcgccgccgcccgaggccccgccgctggagagcgccgagccgctggggcccgccgccgatctgtgggccgacgtggacctcaccgagttcgaccagtacctcaactgcagccggactcggcccgacgcccccgggctcccgtaccacgtggcactggccaaactgggcccgcgcgccatgtcctgcccagaggagagcagcctgatctccgcgctgtcggacgccagcagcgcggtctattacagcgcgtgcatctccggctaggccgccggcgccgcccgggtccctgcagcgcttcctccc

SEQ ID NO: 54 - protein, 384 aa, Homo sapiens [sequence omitted]

SEQ ID NO: 55 - DNA, 256 bp, Homo sapiens
  KIAA0062
  misc_feature 2..4: n = a, c, g, or t
  misc_feature 6..7: n = a, c, g, or t
  misc_feature 9..11: n = a, c, g, or t
  misc_feature 13..13: n = a, c, g, or t
  misc_feature 16..17: n = a, c, g, or t
  misc_feature 24..24: n = a, c, g, or t
  misc_feature 35..36: n = a, c, g, or t
  misc_feature 38..41: n = a, c, g, or t
  misc_feature 43..44: n = a, c, g, or t
  misc_feature 46..47: n = a, c, g, or t
  misc_feature 52..53: n = a, c, g, or t
  misc_feature 55..56: n = a, c, g, or t
  misc_feature 60..61: n = a, c, g, or t
  misc_feature 63..63: n = a, c, g, or t
cnnngnngnnncncgnnccgaggntacaaatgctnngnnnncnncnnattcnncnnctannantcaaaagaaattgccaatttttgactcatgaggcaaagctgttgccacaatcagtggcgactcaagtcagacgatgtgagcgtctccgcccctcctaagctccgactaggactgacctctgcgccaactacggtttaaagaggatttccctttgaggcagctgtctatggaaggaaatttcttaaggtaatat

SEQ ID NO: 56 - DNA, 256 bp, KIAA0582
  misc_feature 9..9: n = a, c, g, or t
  misc_feature 18..22: n = a, c, g, or t
  misc_feature 24..24: n = a, c, g, or t
  misc_feature 27..27: n = a, c, g, or t
  misc_feature 30..30: n = a, c, g, or t
  misc_feature 32..32: n = a, c, g, or t
  misc_feature 35..35: n = a, c, g, or t
ctttgtgantcctttaannnnncnacncananacncccagcgtggtcgcggccgaggtacaaaaataagtggtaagataattgtaaaatgaaatggacagaatattcaattttccatctatgaaaatttcacaataaaaatcgtagtttactttgtattataggcgtgcttggtggatctattcatcctcacataaggcaactgacaaattcctgaagttaccaatagttattttggtgaagatctttaatgcttc

SEQ ID NO: 57 - DNA, 256 bp, KIAA0101
  misc_feature 3..4: n = a, c, g, or t
  misc_feature 9..9: n = a, c, g, or t
gcnngggcnggtacgcggggagagaccttggagcgcgcgggaaagagaccaatataaactgtggcgggatagttttcggggccttgtccagtgaaacaccctcgactgggaagtcagttcgttctctcctctcctctcttcttgtttgaacatggtgcggactaaagcagacagtgttccaggcacttacagaaaagtggtggctgctcgagcccccagaaaggtgcttggttcttccacctctgccactaattcg

SEQ ID NO: 58 - DNA, 256 bp, Homo sapiens
  KIAA0101
ccctcagcggccgccagggcaggtacgcggggccctgtccagtgaaacaccctcggctgggaagtcagttcgttctctcctctcctctcttcttgtttgaacatggtgcggactaaagcagacagtgttccaggcacttacagaaaagtggtggctgctcgagcccccagaaaggtgcttggttcttccacctctgccactaattcgacatcagtttcatcgaggaaagctgaaaataaatatgcaggagggaacc

SEQ ID NO: 59 - DNA, 256 bp, Homo sapiens
  KIAA0644
  misc_feature 3..4: n = a, c, g, or t
cgnngagtacgccctcgagcggccgccagggcaggtactgttaatattaaaaggaacgtaataaaatggcccagtccaactaaaacagtccttgagtctattggtcagttcgttaaatgtcagagcttttcacatttttgaaaaaaaaaaatgcgtctcttattaaactttaaggtatcctgaatgctctatcagccaacataaacgagttccttggcaggtatgttaaactttaccacctgtttacatccccctt

SEQ ID NO: 60 - DNA, 256 bp, Homo sapiens
  KIAA0626
  misc_feature 49..50: n = a, c, g, or t
  misc_feature 54..54: n = a, c, g, or t
  misc_feature 70..70: n = a, c, g, or t
  misc_feature 76..77: n = a, c, g, or t
  misc_feature 79..79: n = a, c, g, or t
  misc_feature 87..87: n = a, c, g, or t
  misc_feature 90..90: n = a, c, g, or t
  misc_feature 92..92: n = a, c, g, or t
  misc_feature 124..124: n = a, c, g, or t
  misc_feature 127..127: n = a, c, g, or t
  misc_feature 152..153: n = a, c, g, or t
  misc_feature 175..175: n = a, c, g, or t
  misc_feature 180..180: n = a, c, g, or t
  misc_feature 187..187: n = a, c, g, or t
  misc_feature 189..189: n = a, c, g, or t
  misc_feature 191..191: n = a, c, g, or t
  misc_feature 204..204: n = a, c, g, or t
  misc_feature 212..212: n = a, c, g, or t
  misc_feature 216..216: n = a, c, g, or t
  misc_feature 220..220: n = a, c, g, or t
  misc_feature 226..226: n = a, c, g, or t
  misc_feature 238..238: n = a, c, g, or t
  misc_feature 240..240: n = a, c, g, or t
  misc_feature 243..243: n = a, c, g, or t
  misc_feature 249..249: n = a, c, g, or t
ccctttttggcttgagtaattctataaatgtttctatccttggtttttnnccangctattcctactcttnaaaatnncnaccaaatntcntngcattttcacatattttgagcatcaagatacnggnccattttaaaattatccttcagcanntatgcacagtttattttcctantgacntttttangntntcttcattgatcnaccaggtntggnttanaccaancaattgtggggnanctntcaaanaaaacaa

SEQ ID NO: 61 - DNA, 27 bp, Artificial sequence
  Synthetic primer
gccatctagactactcatgaagcagct

SEQ ID NO: 62 - DNA, 32 bp, Artificial sequence
  Synthetic primer
gcgcagaattcggccctgaccatgacagcaca

SEQ ID NO: 63 - DNA, 38 bp, Artificial sequence
  Synthetic primer
ctcatcaagtggtttagcgctttccgtagttttactac

SEQ ID NO: 64 - DNA, 38 bp, Artificial sequence
  Synthetic primer
gtagtaaaactcacggaagcgctaaaccacttgatgag

SEQ ID NO: 65 - protein, 162 aa, Homo sapiens
MWKVSALLFVLGSASLWVLAEGASTGQPEDDTETTGLEGGVAMPGAEDDVVTPGTSEDRYKSGLTTLVATSVNSVTGIRIEDLPTSESTVHAQEQSPSATASNVATSHSTEKVDGDTQTTVEKDGLSTVTLVGIIVGVLLAIGFIGGIIVVVMRKMSGRYSP

SEQ ID NO: 66 - DNA, 1081 bp, Homo sapiens
gataaatgctgactccgctcggaaagttctcaactgcaaagtttgctgtccggctgcctagggtctgggaagctcgggcaccctccctctccggggctcctgctcccacccctccggcccccccaccgtcgcgctcctccaggctgggcctgtggccgcggtgctttttaattttcccccagctcagaatcttgctgctcggcccccaggagagcaacaactcaacgggaacgatgtggaaggtgtcagctctgctcttcgttttgggaagcgcgtcgctctgggtcctggcagaaggagccagcacaggccagccagaagatgacactgagactacaggtttggaaggcggcgttgccatgccaggtgccgaagatgatgtggtgactccaggaaccagcgaagaccgctataagtctggcttgacaactctggtggcaacaagtgtcaacagtgtaacaggcattcgcatcgaggatctgccaacttcagaaagcacagtccacgcgcaagaacaaagtccaagcgccacagcctcaaacgtggccaccagtcactccacggagaaagtggatggagacacacagacaacagttgagaaagatggtttgtcaacagtgaccctggttggaatcatagttggggtcttactagccatcggcttcattggtggaatcatcgttgtggttatgcgaaaaatgtcgggaaggtactcgccctaaagagctgaagggttacgccctgctgccaacgtgcttaaaaaaagaccgtttctgactctgtgccctgtccctgagctcgtgggagaagatgacccgtggaacacttgcctggcccactcagaatccacggtgacctctccgcttgccaaaataaccgaaggaaagaccgttcaccagacttggctcctctaaacatttgctgttcaaacatgtttttgaatatacattctataaaagattatttgaaagacaaaattcatagaaaatggagcaaaactgtataaactgatttgtaactaacactggaccattggatcgatattatatgctgtaaccatgaaaaaaaaaaaaaaaaaaaa

SEQ ID NO: 67 - protein, 135 aa, Homo sapiens
MPVDFTGYWKMLVNENFEEYLRALDVNVALRKIANLLKPDKEIVQDGDHMIIRTLSTFRNYIMDFQVGKEFEEDLTGIDDRKCMTTVSWDGDKLQCVQKGEKEGRGWTQWIEGDELHLEMRVEGVVCKQVFKKVQ

SEQ ID NO: 68 - DNA, 720 bp, Homo sapiens
gggggggggcggagggcgctcatttccgggccgcccaccacccgcgtagcaccggcagccgctgtcccggcagtctccagccgtcccgcccgcttgtggccaaactggctccagtcactcccgaaatgccagtcgacttcactgggtactggaagatgttggtcaacgagaatttcgaggagtacctgcgcgccctcgacgtcaatgtggccttgcgcaaaatcgccaacttgctgaagccagacaaagagatcgtgcaggacggtgaccatatgatcatccgcacgctgagcacttttaggaactacatcatggacttccaagttgggaaggagtttgaggaggatctgacaggcatagatgaccgcaagtgcatgacaacagtgagctgggacggagacaagctccagtgtgtgcagaagggtgagaaggaggggcgtggctggacccagtggatcgagggtgatgagctgcacctagagatgagagtggaaggtgtggtctgcaagcaagtattcaagaaggtgcagtgaggcccaagcagacaaccttgtcccaaccaatcagcaggatgtgtgagccaggatccctctttgcacagcatgaggcaaaaatgtccagccacccctaggcatctgttagcagagtctgtctcttggctttgtcacttttccttttcttaaaacaaagccatgccaataaagtgacctgtgttcaaaa

SEQ ID NO: 69 - protein, 1456 aa, Homo sapiens [sequence omitted]

SEQ ID NO: 70 - DNA, 1206 bp, Homo sapiens
gcatgcaaccctctgcctccctcccacgttttccataatgattttatttatttatagctgacacaaggaagatggacccttctaaaccgtcttccaacgtggccggagtagtcatcattgtgatcctcctgattttaacgggtgctggccttgccgcctatttcttttataagaaaagacgtgtgcacctacctcaagagggcgcctttgaaaacactctgtattttaacagtcagtcaagcccaggaactagtgatatgaaagatctcgtgggcaatattgaacagaatgaacactcggtcatctagtacctcaatgcgattctgagatatttgaatttcataaaattgtaactgaaatttaaaatttttagttcaatgtgattgttttctttaaaatgagtactgaattgtactggtctgtccttttttcctttgcctaattgaagaaataattgcttgttttctagcctggcaagatattttcataaaagagggataacaatgctgattactaccttttaaaatattttagataaatgcacagcaccacagcaccacatctaagcattagtgatgggtagctgatgtcagcttcatgtggattttaagcactctagaaacaatgaagcttcttggcatattttaaggagctcccaaaatgtgttacctattaaattgtaactcagcaagtagaagaccatttgaaaagtcaggtacaaatttcctcaagtggcataaaaatgtagtcagttttctcttttaccagtttttatttccactccaattatttagaactttatttgtacatgtgcagaagaataaggcagctgagaatcttgtttcccccaagagagttttacaggctgagtgttgcaaatgtgttctttgtcctgttatatgtatatcaggaatacaaggatgtgaaataaaactgtaaatttgcataactggatgtacttagataatgtgaaataaacattaaagacaaggtctatttttaatagatttgcattttggtgatcttagtataaatttgcttttaaatgagatgtatttatccactcactttacactttaacttgacacttatgatattatttgtagagaaattctttaaatgaaactcatgaactattttgaaaaggagtgttgctaaaatgctgtgtgtaaaatgaattttttaccgtaatgattttgccagatc

SEQ ID NO: 71 - protein, 392 aa, Homo sapiens
MASELAMSNSDLPTSPLAMEYVNDFDLMKFEVKKEPVETDRIISQCGRLIAGGSLSSTPMSTPCSSVPPSPSFSAPSPGSGSEQKAHLEDYYWMTGYPQQLNPEALGFSPEDAVEALISNSHQLQGGFDGYARGAQQLAAAAGAGAGASLGGSGEEMGPAAAVVSAVIAAAAAQSGAGPHYHHHHHHAAGHHHHPTAGAPGAAGSAAASAGGAGGAGGGGPASAGGGGGGGGGGGGGGAAGAGGALHPHHAAGGLHFDDRFSDEQLVTMSVRELNRQLRGVSKEEVIRLKQKRRTLKNRGYAQSCRFKRVQQRHVLESEKNQLLQQVDHLKQEISRLVRERDAYKEKYEKLVSSGFRENGSSSDNPSSPEFFITEPTRKLEPSVGYATFWKP

SEQ ID NO: 72 - DNA, 2145 bp, Homo sapiens
atcttttttcatcttctagctgtagctcgggctgcttgtcggcttggctccccctcccccctttgctctctgcctcgtctttccccaggacttcgctattttgcttttttaaaaaaaggcaagaaagaactaaactcccccctccctctcctccagtcgggctgcacctctgccttgcactttgcacagaggtagagagcgcgcgagggagagagaggaaagaaaaaaaataataaagagagccaagcagaagaggaggcgagaagcatgaagtgttaactcccccgtgccaaggcccgcgccgcccggacagacgcccgccgcgccttccagccccgagcggacgccgcgcgccgccctgcctgcagcccgggccggcgacggcgagcccttccttatgcaaagcgcgccagcagcgcgaaggcgggacgccgcgcaccgggccgggctcctccagcttcgccgccgcagccaccaccgccgccaccgcagctcgcggaggatcttcccgagcctgaagccgccggctcggcgcgcaaggaggcgagcgcaaggaggggccggggcgagcgagggagcacattggcgtgagcaggggggagggagggcgggcgcggggggcgcgggcagggcgggggggtgtgtgtgtgagcgcgcttggaggtttcgggccagccaccgccgcgcaagctagaagcgccccagcccggcaagctggctcacccgctggccacccagcacagcccgctggcccctctcctgcagcccatctggcggagcggcggcggcggcggcggcggcaggagaatggcatcagaactggcaatgagcaactccgacctgcccaccagtcccctggccatggaatatgttaatgacttcgatctgatgaagtttgaagtgaaaaaggaaccggtggagaccgaccgcatcatcagccagtgcggccgtctcatcgccgggggctcgctgtcctccacccccatgagcacgccgtgcagctcggtgcccccttcccccagcttctcggcgcccagcccgggctcgggcagcgagcagaaggcgcacctggaagactactactggatgaccggctacccgcagcagctgaaccccgaggcgctgggcttcagccccgaggacgcggtcgaggcgctcatcagcaacagccaccagctccagggcggcttcgatggctacgcgcgcggggcgcagcagctggccgcggcggccggggccggtgccggcgcctccttgggcggcagcggcgaggagatgggccccgcggccgccgtggtgtccgccgtgatcgccgcggccgccgcgcagagcggcgcgggcccgcactaccaccaccaccaccaccacgccgccggccaccaccaccacccgacggccggcgcgcccggcgccgcgggcagcgcggccgcctcggccggtggcgctgggggcgcgggcggcggtggcccggccagcgctgggggcggcggcggcggcggcggcggcggaggcggcgggggcgcggcgggggcggggggcgccctgcacccgcaccacgccgccggcggcctgcacttcgacgaccgcttctccgacgagcagctggtgaccatgtctgtgcgcgagctgaaccggcagctgcgcggggtcagcaaggaggaggtgatccggctgaagcagaagaggcggaccctgaaaaaccgcggctatgcccagtcctgccgcttcaagagggtgcagcagagacacgtcctggagtcggagaagaaccagctgctgcagcaagtcgaccacctcaagcaggagatctccaggctggtgcgcgagagggacgcgtacaaggagaaatacgagaagttggtgagcagcggcttccgagaaaacggctcgagcagcgacaacccgtcctctcccgagtttttcataactgagcccactcgcaagttggagccatcagtgggatacgccacattttggaagccccagcatcgtgtacttaccagtgtgttcacaaaatgaaatttgtgtgagagctgtacattaaaaaaaacatcattattattattatttgcagtcatggagaaccacctacccctgacttctgtttagtctcctttttaaataatactgtgttagaaaaaaaaa

SEQ ID NO: 73 - protein, 381 aa, Homo sapiens
  misc_feature (59)..(59): Xaa = selenocysteine
  misc_feature (300)..(300): Xaa = selenocysteine
  misc_feature (318)..(318): Xaa = selenocysteine
  misc_feature (330)..(330): Xaa = selenocysteine
  misc_feature (345)..(345): Xaa = selenocysteine
  misc_feature (352)..(352): Xaa = selenocysteine
  misc_feature (367)..(367): Xaa = selenocysteine
  misc_feature (369)..(369): Xaa = selenocysteine
  misc_feature (376)..(376): Xaa = selenocysteine
  misc_feature (378)..(378): Xaa = selenocysteine
MWRSLGLALALCLLPSGGTESQDQSSLCKQPPAWSIRDQDPMLNSNGSVTVVALLQASXYLCIIEASKLEDLRVKLKKEGYSNISYIVVNHQGISSRLKYTHLKNKVSEHIPVYQQEENQTDVWTLLNGSKDDFLIYDRCGRLVYHLGLPFSFLTFPYVEEAIKIAYCEKKCGNCSLTTLKDEDFCKRVSLATVDKTVETPSPHYHHEHHHNHGHQHLGSSELSENQQPGAPNAPTHPAPPGLHHHHKHKGQHRQGHPENRDMPASEDLQDLQKKLCRKRCINQLLCKLPTDSELAPRSXCCHCRHLIFEKTGSAITXQCKENLPSLCSXQGLRAEENITESCQXRLPPAAXQISQQLIPTEASASXRXKNQAKKXEXPSN

SEQ ID NO: 74 - DNA, 2038 bp, Homo sapiens
gcaggcccgttggaagtggttgtgacaaccccagcaatgtggagaagcctggggcttgccctggctctctgtctcctcccatcgggaggaacagagagccaggaccaaagctccttatgtaagcaacccccagcctggagcataagagatcaagatccaatgctaaactccaatggttcagtgactgtggttgctcttcttcaagccagctgatacctgtgcatcatcgaggcatctaaattagaagacctgcgagtaaaactgaagaaagaaggatattctaatatttcttatattgttgttaatcatcaaggaatctcttctcgattaaaatacacacatcttaagaataaggtttcagagcatattcctgtttatcaacaagaagaaaaccaaacagatgtctggactcttttaaatggaagcaaagatgacttcctcatatatgatagatgtggccgtcttgtatatcatcttggtttgcctttttccttcctaactttcccatatgtagaagaagccattaagattgcttactgtgaaaagaaatgtggaaactgctctctcacgactctcaaagatgaagacttttgtaaacgtgtatctttggctactgtggataaaacagttgaaactccatcgcctcattaccatcatgagcatcatcacaatcatggacatcagcaccttggcagcagtgagctttcagagaatcagcaaccaggagcaccaaatgctcctactcatcctgctcctccaggccttcatcaccaccataagcacaagggtcagcataggcagggtcacccagagaaccgagatatgccagcaagtgaagatttacaagatttacaaaagaagctctgtcgaaagagatgtataaatcaattactctgtaaattgcccacagattcagagttggctcctaggagctgatgctgccattgtcgacatctgatatttgaaaaaacagggtctgcaatcacctgacagtgtaaagaaaacctcccatctttatgtagctgacagggacttcgggcagaggagaacataactgaatcttgtcagtgacgtttgcctccagctgcctgacaaataagtcagcagcttatacccacagaagccagtgccagttgacgctgaaagaatcaggcaaaaaagtgagaatgaccttcaaactaaatatttaaaataggacatactccccaatttagtctagacacaatttcatttccagcatttttataaactaccaaattagtgaaccaaaaatagaaattagatttgtgcaaacatggagaaatctactgaattggcttccagattttaaattttatgtcatagaaatattgactcaaaccatattttttatgatggagcaactgaaaggtgattgcagcttttggttaatatgtctttttttttctttttccagtgttctatttgctttaatgagaatagaaacgtaaactatgacctaggggttttctgttggataattagcagtttagaatggaggaagaacaacaaagacatgctttccattttttcctttacttatctctcaaaacaatattactttgtcttttcaatcttctacttttaactaataaaataagtggattttgtattttaagatccagaaatacttaacacgtgaatattttgctaaaaaagcatatataactattttaaatatccatttatcttttgtatatctaagactcatcctgatttttactatcacacatgaataaaggcctttgtatctttctttctctaatgttgtatcatactcttctaaaacttgagtggctgtcttaaaagatataaggggaaagataatattgtctgtctctatattgcttagtaagtatttccatagtcaatgatggtttaataggtaaaccaaaccctataaacctgacctcctttatggttaatactattaagcaagaatgcagtacagaattggatacagtacggatttgtccaaataaattcaataaaaaccttaaaaaaaaaaaaaaaaaaaaaa

SEQ ID NO: 75 - protein, 1215 aa, Homo sapiens
MKCFFPVLSCLAVLGVVSAQRQVTVQEGPLYRTEGSHITIWCNVSGYQGPSEQNFQWSIYLPSSPEREVQIVSTMDSSFPYAIYTQRVRGGKIFIERVQGNSTLLHITDLQARDAGEYECHTPSTDKQYFGSYSAKMNLVVIPDSLQTTAMPQTLHRVEQDPLELTCEVASETIQHSHLSVAWLRQKVGEKPVEVISLSRDFMLHSSSEYAQRQSLGEVRLDKLGRTTFRLTIFHLQPSDQGEFYCEAAEWIQDPDGSWYAMTRKRSEGAVVNVQPTDKEFTVRLETEKRLHTVGEPVEFRCILEAQNVPDRYFAVSWAFNSSLIATMGPNAVPVLNSEFAHREARGQLKVAKESDSVFVLKIYHLRQEDSGKYNCRVTEREKTVTGEFIDKESKRPKNIPIIVLPLTDNWVVKVPQHHQLLSQGHLESSISVEVASNASVILEGEDLRFSCSVRTAGRPQGRFSVIWQLVDRQNRRSNIMWLDRDGTVQPGSSYWERSSFGGVQMEQVQPNSFSLGIFNSRKEDEGQYECHVTEWVRAVDGEWQIVGERRASTPISITALEMGFAVTAISRTPGVTYSDSFDLQCIIKPHYPAWVPVSVTWRFQPVGTVEFHDLVTFTRDGGVQWGDRSSSFRTRTAIEKAESSNNVRLSISRASDTEAGKYQCVAELWRKNYNNTWTRLAERTSNLLEIRVLQPVTKLQVSKSKRTLTLVENKPIQLNCSVKSQTSQNSHFAVLWYVHKPSDADGKLILKTTHNSAFEYGTYAEEEGLRARLQFERHVSGGLFSLTVQRAEVSDSGSYYCHVEEWLLSPNYAWYKLAEEVSGRTEVTVKQPDSRLRLSQAQGNLSVSGDPAGTAGVCGSQPHQHNLPAHGGMVCMEAQPPERETVARLSRDATFHYGEQAAKNNLKGRLHLESPSPGVYRLFIQNVAVQDSGTYSCHVEEWLPSPSGMWSKRAEDTAGQTALTVMRPDASLQVDTVVPNATVSEKAAFQLDCSIVSRSSQDSRFAVAWYSLRTKAGGKRSSPGLEEQEEEREEEEEEEEDDDDDDPTERTALLSVGPDAVFGPEGNPWEGRLRFQRLSPVLYRLTVLQASPQDTGNYSCHVEEWLPSPQKEWYRLTEEESAPIGIRVLDTSPTLQSIICSNDALFYFVFFYPFPIFGILIITILLVRFKSRNSSKNSDGKNGVPLLWIKEPHLNYSPTCLEPPVLSIHPGAID

SEQ ID NO: 76 - DNA, 3845 bp, Homo sapiens
ttccaaaactgttctctggagctataagtggattgccagaaatgagagattaggagctgggagaagaggaagcgccttgtgttgtgtctcctggaggctgccgacatgaagtgctttttcccggtgctgagctgtctggctgtgctgggtgtggtgtcagcacagcggcaggtcaccgttcaggaaggacccttgtaccgcacggagggctcccacatcactatctggtgcaatgtgagtggctaccagggaccttctgagcagaatttccagtggtccatttacctgccttcgtcgccagagcgagaggtgcagatcgtcagcaccatggactcttccttcccctatgccatctacacccagcgcgtccgcggagggaagatcttcatagaaagagtccaggggaactcaaccctattgcacatcacagatcttcaggcccgggatgccggggagtatgaatgccacacacccagcactgataagcaatactttgggagttacagtgcaaagatgaacctagtggtgatcccagactccctgcagaccactgccatgccccagactctgcacagagtggagcaggacccgctggagctcacttgtgaggtggcctcagagaccattcagcacagccacctgtctgtggcctggctccggcagaaagttggcgagaagcccgtggaggtcatctccctgagccgagatttcatgcttcactccagcagcgaatatgcccagaggcagagcctgggggaggtgcggctggacaagctggggaggaccaccttccgcctcaccatcttccacctgcagccttctgaccagggcgaattctactgcgaggccgccgagtggatccaggatccggatgggtcgtggtatgctatgacccgaaagcgttccgagggagccgtggtcaacgtccagccaactgacaaagaattcactgttcggctggagacagagaagcggctgcacacggtgggcgagccggtggagttcagatgcatcctggaggctcagaatgttcccgaccgttactttgctgtctcctgggccttcaacagctcgctcatcgccaccatgggtcctaacgctgtgcctgtcctcaacagcgaatttgctcaccgggaagccaggggacagcttaaggtggccaaagagagcgacagtgtctttgtgctgaagatctaccacctccgccaggaagatagcgggaaatacaactgccgggtgactgagcgagagaaaaccgtgaccggggaattcattgataaggagagcaagcgtcccaagaacatccccatcatagtcctccccctcacagataactgggtagttaaagtcccccagcaccaccagctcctgtcccaaggccacttggagagcagcatctccgtggaggtggccagcaatgccagcgtcatccttgagggcgaggacctgcgcttctcctgcagtgtccgcacggcaggcaggccgcagggtcgcttctctgtcatctggcagcttgtggacaggcagaaccgccgcagcaatatcatgtggctagaccgggatggcaccgtgcagccaggctcgtcctactgggagcgcagcagctttgggggcgtccagatggagcaggtgcagcccaactcgttcagcctgggcatcttcaacagcaggaaggaggacgagggccagtatgaatgccatgtgactgaatgggtgcgggcagtggatggcgagtggcagattgttggggagcgccgggccagcactcccatctccatcacagctcttgaaatgggcttcgcagtcacagccatctcccggacaccgggggtgacctacagcgactcctttgacttgcagtgtatcatcaaaccccactaccctgcctgggtccccgtgtcggtgacatggcggttccagccggtgggcacggtggagttccatgacttggtgaccttcacccgggacggaggggtccagtggggggacaggtcctccagcttccgaacccgaactgccatcgagaaggctgagtccagcaacaacgtccgcctaagcatcagccgagccagtgacacggaagcaggcaagtaccagtgtgtggcagagctgtggcggaagaactacaacaacacctggacgcgactggcggagaggacctccaacctgctggagatcagggtgctgcagccagtgacaaagctgcaggtgagcaaatcgaagaggaccctcaccctggtggaaaacaagcccattcagttgaactgctcagtcaagtcccagactagccagaactcccactttgcggtgctctggtatgtccacaagccctcggatgccgatggcaagcttatcctgaagaccacccacaactccgcctttgaatacggtacttacgccgaggaggagggcctgagagccaggctccagtttgagaggcatgtgtcggggggcctgttcagcctcaccgtccagagagccgaggtcagcgacagcggcagctactactgccacgtggaggagtggctgctgagccccaactacgcctggtacaagctggcagaggaggtttctgggcgcacagaagtcactgtgaaacagccagacagccgcctgaggctcagccaagcccaggggaacctgtcggtttctggagacccggcaggtacagctggagtgtgtggttctcaaccgcaccagcataacctcccagctcatggtggaatggtttgtatggaagcccaaccacctgagcgggagactgtggcccgcttgagccgtgacgccaccttccactatggagagcaggcagccaagaacaatctgaaggggcggctgcatttggagagtccttcccccggcgtgtaccgtctcttcatccagaacgtggctgtgcaggacagcgggacctacagctgccatgtggaggagtggctgcccagccccagtggcatgtggtctaagcgggcagaggacaccgctgggcagacagctctgacagtcatgcgaccagatgcttccctgcaggtggacacagtggtccccaatgccacggtctctgagaaggcagctttccagctggactgtagcatcgtgtcccgctccagccaggactcccgcttcgctgtggcctggtattccctgaggactaaagctggggggaaaaggagcagccctggcctggaggaacaggaagaggaaagggaggaggaggaggaggaggaggaggacgacgacgacgacgacccaacagagcggacggccctgctgagcgtgggcccagatgctgtctttggcccagagggcaatccttgggagggcaggcttcgcttccagaggctctccccggtgctctaccggctcacagtgctgcaggcaagcccccaagatacaggcaattactcctgccatgtggaggagtggctgcccagccctcagaaggaatggtaccggctgacggaggaggagtcagcccccatcggcatccgtgttctagatacaagtcccaccctccagtccatcatctgctccaacgacgcactcttctacttcgtcttcttctaccctttccccatctttggcattcttatcatcaccatccttctggtgcgtttcaagagccggaactccagcaagaactctgatgggaagaatggggtgcctctgctgtggatcaaagagccacacctcaactactcccctacttgcctggagccccctgttctcagtatccatccaggggccatagactaagcgggtgatgccccagcggatgttggccacggaggagctgaggctctccctttctctgtgattggacagttgacagcacccaaactctgggg

SEQ ID NO: 77 - protein, 376 aa, Homo sapiens
MSDSKEPRVQQLGLLEEDPTTSGIRLFPRDFQFQQIHGHKSSTGCLGHGALVLQLLSFMLLAGVLVAILVQVSKVPSSLSQEQSEQDAIYQNLTQLKAAVGELSEKSKLQEIYQELTQLKAAVGELPEKSKLQEIYQELTRLKAAVGELPEKSKLQEIYQELTRLKAAVGELPEKSKLQEIYQELTELKAAVGELPEKSKLQEIYQELTQLKAAVGELPDQSKQQQIYQELTDLKTAFERLCRHCPKDWTFFQGNCYFMSNSQRNWHDSVTACQEVRAQLVVIKTAEEQNFLQLQTSRSNRFSWMGLSDLNQEGTWQWVDGSPLSPSFQRYWNSGEPNNSGNEDCAEFSGSGWNDNRCDVDNYWICKKPAACFRDE

SEQ ID NO: 78 - DNA, 1800 bp, Homo sapiens
aataaaagctgtggtccccaggagtcctgaacatctggggacagcgggaaaacatgagtgactccaaggaaccaagggtgcagcagctgggcctcctggaagaagatccaacaaccagtggcatcagactttttccaagagactttcaattccagcagatacatggccacaagagctctacagggtgtcttggccatggcgccctggtgctgcaactcctctccttcatgctcttggctggggtcctggtggccatccttgtccaagtgtccaaggtccccagctccctaagtcaggaacaatccgagcaagacgcaatctaccagaacctgacccagcttaaagctgcagtgggtgagctctcagagaaatccaagctgcaggagatctaccaggagctgacccagctgaaggctgcagtgggtgagttgccagagaaatccaagctgcaggagatctaccaggagctgacccggctgaaggctgcagtgggtgagttgccagagaaatccaagctgcaggagatctaccaggagctgacccggctgaaggctgcagtgggtgagttgccagagaaatccaagctgcaggagatctaccaggagctgacggagctgaaggctgcagtgggtgagttgccagagaaatccaagctgcaggagatctaccaggagctgacccagctgaaggctgcagtgggtgagttgccagaccagtccaagcagcagcaaatctatcaagaactgaccgatttgaagactgcatttgaacgcctgtgccgccactgtcccaaggactggacattcttccaaggaaactgttacttcatgtctaactcccagcggaactggcacgactccgtcaccgcctgccaggaagtgagggcccagctcgtcgtaatcaaaactgctgaggagcagaacttcctacagctgcagacttccaggagtaaccgcttctcctggatgggactttcagacctaaatcaggaaggcacgtggcaatgggtggacggctcacctctgtcacccagcttccagcggtactggaacagtggagaacccaacaatagcgggaatgaagactgtgcggaatttagtggcagtggctggaacgacaatcgatgtgacgttgacaattactggatctgcaaaaagcccgcagcctgcttcagagacgaatagttgtttccctgctagcctcagcctccattgtggtatagcagaacttcacccacttgtaagccagcgcttcttctctccatccttggaccttcacaaatgccctgagacggttctctgttcgatttttcatcccctatgaacctgggtcttattctgtccttctgatgcctccaagtttccctggtgtagagcttgtgttcttggcccatccttggagctttataagtgacctgagtgggatgcatttagggggcgggcttggtatgttgtatgaatccactctctgttccttttggagattagactatttggattcatgtgtagctgccctgtcccctggggctttatctcatccatgcaaactaccatctgctcaacttccagctacaccccgtgcacccttttgactggggacttgctggttgaaggagctcatcttgcaggctggaagcaccagggaattaattcccccagtcaaccaatggcatccagagagggcatggaggctccatacaacctcttccacccccacatctttctttgtcctatacatgtcttccatttggctgtttctgagttgtagcctttataataaagtggtaaatgttgtaactgc

SEQ ID NO: 79 - protein, 306 aa, Homo sapiens
MHDSGLLNITKVSFSDRGKYTCVASNIYGTVNNTVTLRVIFTSGDMGVYYMVVCLVAFTIVMVLNITRLCMMSSHLKKTEKAINEFFRTEGAEKLQKAFEIAKRIPIITSAKTLELAKVTQFKTMEFARYIEELARSVPLPPLIMNCRTIMEEIMEVVGLEEQGQNFVRHTPEGQEAADRDEVYTIPNSLKRSDSPAADSDASSLHEQPQQIAIKVSVHPQSKKEHADDQEGGQFEVKDVEETELSAEHSPETAEPSTDVTSTELTSEEPTPVEVPDKVLPPAYLEATEPAVTHDKNTCIIYESHV

SEQ ID NO: 80 - DNA, 1961 bp, Homo sapiens
ttatgccggggagggctgagctatcgctagggaacccacggtgactgaatcaaagggaagaaagacccaagacctggatctcccttttacatggaccctaaagcaaaggaaaatggcaaatgcacgacagcggcctcctgaacatcaccaaggtatccttctcagaccgaggtaaatacacgtgtgtggcttctaacatctacggcaccgtgaacaacacggtgaccttgcgcgtcatcttcacttctggagacatgggtgtctactacatggtcgtgtgcctggtggccttcaccatcgtcatggtcctcaatatcacccgcctgtgcatgatgagcagccatctaaagaagactgagaaggccatcaatgagttctttaggaccgaaggtgcagagaagctgcagaaggcatttgagatcgccaagcgcatccccatcatcacctccgccaaaactctagagcttgccaaagtcacccagttcaaaaccatggagttcgcccgctacatcgaagagcttgccaggagcgtgcctctgccgcctctcattatgaactgcaggactatcatggaggagattatggaggtggttgggctggaggagcaggggcagaattttgtgaggcatactccagagggccaggaggccgcagacagggatgaggtctacacaatccccaactctctgaagcggagcgactcccctgccgctgactcggacgcctcatcgctgcacgagcaacctcagcaaattgccatcaaggtgtcagttcacccgcagtccaaaaaagagcatgcagatgaccaagagggtggacagtttgaagtcaaagatgtagaggagacagaactgtcggcggaacattcccccgaaactgcagaaccttctaccgatgtcacgtccaccgagctaacatctgaagagccaacacctgttgaggtaccagataaggtactgccgccagcttacctggaagccacagagccagcagtgacacatgacaaaaacacctgcattatttacgaaagccatgtctaataccaaccccgaaaagctatgcatatcaagaaaatcaggggctgctccttgtaatacagatgtagtacgcacttgccgctaagccttaccaggagactctcatcccttaggtaggagtgatgccactttaaaaggagaaacacctgcctgcagtgaatgggactggaatttccccagtagagaagggtgcgagaaacatcagggtgcagaattgataccagacagaaggtgtctatgtgataatgagtttcagaggctgatctctgccaaataccttaattggtgatgccttcttggcaaagagtacaccactgtaagatattctgagttcaagaaccctgtccagtgccccctgcattgcttttccttttaaaaagtataggtctgctacaatagcaaacgcacgtacgtgggttttttgcagtttcttctcagttttaattttgcttttcctttataatggggtcattgttattaatactaattgttctttctggtttagtcctcattgccacttttgtccttatgtttccctagaacacgtacctcagagactttggtatcagtcaccagtaccagggctgatatctacaagtcacattacatttgtcatgttccaaagtagttacgaggcttgttatttttttttcattccccaggcctatttccatagatagctttttttgtttgtttccaacgaagctgctgttaaacgaaactgagaaaaactttgccccggaatagcactttaatagtcaaaaatgtgtttacctgtctgattgagtgagccttttggtgagctcagctgagatgtagagggagattgtaaaaggttaaatatacccacaccacccatgaaagtcactgtttaagttacatcatcctccaaataaagactgattctttacctggaaaaaaaaa

SEQ ID NO: 81 - protein, 623 aa, Homo sapiens
MEHAVAPCVLYPGTEPGAAGESESEGAASPAQTPCSLGASLCFSSGEESPPQSLASAAEGAATSPPSSGGPRVVERQWEAGSAGAASPEELASPEERACPEEPAAPSPEPRVWLEDPASPEEPGEPAPVPPGFGAVYGEPDLVLEVSGRRLRAHKAVLAARSDYFRARASRDVLRVQGVSLTALRLLLADAYSGRMAGVRPDNVAEVVAGARRLQLPGAAQRATDAVGPQLSLANCYEVLSAAKRQRLNELRDAAYCFMSDHYLEVLREPAVFGRLSGAERDLLLRRRLRAGRAHLLAAALGPAGERAGSRPQSPSGDADARGDAAVYCFHAAAGEWRELTRLPEGAPARGCGLCVLYNYLFVAGGVAPAGPDGRARPSDQVFCYNPATDSWSAVRPLRQARSQLRLLALDGHLYAVGGECLLSVERYDPRADRWAPVAPLPRGAFAVAHEATTCHGEIYVSGGSLFYRLLKYDPRRDEWQECPCSSSRERSADMVALDGFIYRFDLSGSRGEAQAAGPSGVSVSRYHCLAKQWSPCVAPLRLPGGPTGLQPFRCAALDGAIYCVSRAGTWRFQPAREGEAGGDAGQGGGFEALGAPLDVRGVLIPFALSLPEKPPRGEQGAP

SEQ ID NO: 82 - DNA, 6706 bp, Homo sapiens
agcccacccgcctggctgcgcgtcccgggcccggcggctgaagaggagccgcggcgaggaacaagagtgtggtgagaggacgcggaaacacctgatatcccagcaaaggaagctgcagaggaagggtcctgccccgtgagcgaggacagcctccaggagcacagcggcttctcctaacatccccctggcagtgaattacggatgaccccgtatatgaggaggtgtggatgccgacacacggggagagctcctgagaccagcacacaggaccagtgtcctccccgtgaccttgcagttgtgtagccacaagtgggagccacagagaaggagagcccataaggggactcttttcaagacacggtgttaaatcaaggctctgaagttggggccacagccggtctcagctttctgtgttctgggggcgcggtgatatgacagcatgtgaagtgagtgggtgagcacggactcctgagagcgagggcgcacccaatacctagttatccggtactgcagagagacacctggtcagccagcgttgcaaagagggatagctagtcactcaggctgcagagagagacacctggtcacccaggctgcagaaacaaccgcagtcaactgcagctccagtcattgctggatgttggctgacgcggtcctggcgccagctggagatccattcaccaagactttctgggcagatttaaagtggctggggttcagaagttcagcaagttggacacacccctcctcgctggagaggagagggcaaaggcgaggcgggggagcagcgtgtgagattccccccttcacacacacaacaaagcgtggacacacagaagtgaaatctgatcgcgtgccaggaaaagctgtgaggctggaaaccccggagtaaggctcgaccttggccagacctgcaggctgcggaaccgggggcgcgcgggcgcagcgcagcacagcccggccatggagcacgcggtggccccctgcgtcctctacccagggactgagcccggggctgccggggagagcgagagcgagggcgccgcgtccccggcgcagacaccctgcagtctcggcgcgtccctgtgcttcagctccggggaagagtccccgccgcagtccctcgcctcagcggcggaaggcgcggccacctccccgccctccagcggtggcccgcgggtggtggagcggcagtgggaggccggcagcgcgggcgccgcgtccccggaggagctcgcgtcccctgaggagcgcgcgtgcccggaagagcccgcggcgccgtcccccgaaccgcgcgtttggcttgaggaccccgcgtcccccgaggagcccggggagcccgcgcccgtacccccggggttcggggcggtgtacggggagccggacctggtgctggaggtgtcggggcgccggctgcgcgcgcacaaggcggtgctggcggcgcgcagcgactacttccgcgcgcgcgcgtcgcgggacgtgctgcgggtgcagggagtgagcctgacggcgctgcggctgctcctcgccgacgcctacagcgggcgcatggcgggcgtgcggcccgacaacgtggccgaggtggtggccggcgcgcgccgcctgcagctgcccggcgccgcgcagcgcgccaccgacgccgtggggccgcagctgagcctggccaactgctacgaggtcctgagcgcggccaagcggcagcggctgaacgagctgcgcgacgccgcctactgcttcatgagcgaccactatctggaggtgctgcgcgagcccgccgtgttcggccgcctgtcgggcgcagagcgggacctgctgctgcgccgccgcctgcgcgccggccgcgcccacctcttggccgcggcgctcgggccggcgggggagcgcgcgggcagccggcctcagagcccctcgggggacgcggacgcgcgcggggacgcggccgtctactgcttccacgcggcggccggagagtggcgcgagctgacgcggctgcccgagggcgcgccggcgcggggctgcggcctgtgcgtcctctacaactacctcttcgtggcgggcggcgtggcgcccgcgggccccgacggccgcgcgcgcccgtccgaccaggtcttctgctacaacccggccacggacagctggagcgccgtgaggcccctgcgccaggcgcgctcgcagctgcggctgctggccctggacggtcacctctacgccgtgggcggcgagtgcctgctcagcgtggagcgctacgacccgcgcgccgaccgctgggcccccgtggcgccgctgccccggggcgccttcgccgtggcgcatgaggccaccacctgccacggcgagatctacgtgtccgggggctccctcttctatcgcctgctcaagtatgacccgcggcgcgacgagtggcaggagtgcccgtgcagcagcagccgcgagcgctcggccgacatggtggctctcgacggcttcatctaccgcttcgatctgagcggcagccgcggcgaggcgcaggcggcggggccgagcggggtcagcgtgtcccgataccactgcctggccaagcagtggagcccgtgcgtcgcgcccctgcgcctccccggcggccccacgggcctgcagcccttccgctgcgccgccctggacggcgccatctactgcgtgagccgcgcgggcacctggcgcttccagcctgcccgggaaggcgaggccggcggcgacgcaggccagggcggcggcttcgaggcgctgggcgcccccttggacgtccggggtgtgctcatcccgttcgctctcagcctgcctgagaagccgccccgaggggagcagggcgccccgtaggccggcggggtcggcgggcgtctccctcggcaggggtttgcggggcccaggtccctttgggcccgcggaggaggacgtggtggggagtcggggccgctggccacgctggtggtttggacacttcgaaggagccccgaggacgctctcagggccgctttcgctttgctttccttttgcttgtctttgcttctgggggtggatgccttgagacccaggaggtgtgcggatgggtcccttgacagacaggacacagagaaggctgtgggatccaaagggtcagcctcagggtacagtgggggttcctgaggcagcctgcagccggccccggggtgtcccgaaccccgcagagcaccgaggctgtgcgcaggagcctgggaccctcaagtaggtcgccgcgaactatcgggggaagcacgcagagaggggtcacgccttttatttttggcttgagatttaaaattataactgataagtaaagctctttctgatttagttgaaaatttcgtaccatgtgctcgctttggttggctcaactccaaaaagagtaatttaataagcattaaaggtaaaatctttgattaccagtaaggtttcttgttcaatatgcattggaagtatttccttccccacaccattgctactcaaactcacatgcctagagcagctccgtctcactgttggaccgagggggctttcatattttcagttgaaaggatgttaactgatgtagcgatgatttaccattatttaaattttaagtcttcagtggctaaatgtgaccaaacagcacatcataagtaggaaaaacttaccagggtgcttgtctatctaaaaagcaatttttgatagtccactctgtatgcccagccgctttcataatctggaacgagataaaatattcctaaaaagcggggaaaatcattttgctttgacagttctataaaaaaaagtgtaggcacattttaaacccactgtatatgatgttttcaatgtggatcgtgtagttctgatgagggagattaatttttacaatcagtattctaagtgtggccgagtgacagtgggcatagatttataacaaggaagtgacgtgcttatcaccatagatttgcaagtaaactgcatgtatttaattgtattgaattgagttccaaaataccctaatagaattaacacgaggctcactgcattgacagggtatgaggattaaaaacaaatcagttgggtcgtttctcatttaacattttacttttcaagtgtgtatacagaggacttactattatgactttgaggatgagatccatgctcacaaatagaggcgaacatttgaactccgaatccaacccattttcttactgtaagaggaaaagttactggaacgtaactagttgaaatcctgcctactttaatattatttgtttgttaatccagtaatgggaactgccatctctgtagaaatcagtgggtaattgaaaaataggttatgctttttaaagagtctgtggttatgagaggtctcagttaagtgtgtttagaagtgatcagcttgaaccttatgcatgactcgggggctggaatttatgatctgggttacggtatgttctggggacgtgtctgcttgcccatggttactcatgaactgaggggatagcttggcaacttggttaatcatcttgggaaagaaaaacagacttcatatcgcctgacttgattggccttttataggagtatactggagaaatggttgtagaaacagtatttacagcaaaaggaaacaaataatgttcattttaagcaatgtaccattcacactgtcctgccttttcctctagaattttattaatggtagaaatttttatatgaaatgggaccaggaccaggctaatattttcagtccttaaatatcaaactcatatgctgttatcactgtgattttacttgtgaaatcattcctgtaatgtttagtgtttgaaaatgaaatattgaaattaggtttccagagtaacactgtccccggaaaaggatatgagaagtggtggatgttggatgggggtggttgcacagtcctgtgcggttcccatggctttccagcgtttcatttagtgaaggaatgctcacactagatgtagcacagcttcctgtggggcccggcagcaaagccccaggtgctccctgtcacctcacaacaaaatgcactaagaaacgtaaagaataagaggaattaatacccaccattaaaggatgtccggccaacctattgtggaaatttatagaatagtatacaccacagttctgaatagtgatatcacataaaaatacatactagaggacctgccaagccatgagcagtgtttttgctttttgggggccagtccctggggtgtggagccgctagggtttgcacccatgaaacagaaaagccacaccctccaaggtgtggctttcattttgggactgctgcagggagggcagaggcattgctgagactgcctggcaacggctgatgccccaggtaggaccttttccatttcaaagtggtgttctaagtctgcgtccaacactgtgtaggaaaaaggttggtgcaaaaatattcctggtcatccacccattaaaatagttagatgaggctattgccttgatgacagctgtccacactcctcatgaaattaacccgtatgccggggcatttccaaatgtctgactcgtgaaattaacccatacgcaggggcctttccaaatgtctgaaaaggcagtggtgtcttttggggaaaatgttatgcatggaagcctgaccttttgcttagttgacagcaatcccttctgtattgccaatcaaggttcatttgagatgcagaggaatgagcttgagccttcctccttttccttccggttttattcttcctcttgggaacatccctccactccgcactgcttcctgcagctttgtagagctggatttggaacttcgggatttggtttctgagtctgtggaggcaccgacttctcctgtaagaaaatgaatgttgtggaaattctttggctacttaactaaaactcgtgactgtataagtttggctacaaataagtaagaaattaatcatctgctctgtttctgctaatttctggtgtcacttcagtaattctggtagcagccgttgaatctgtcagtctcttaggtaacttcctgtaaacgatttggaaataggatgttttcaacgttcttttgtcttttgctgaagtcaggatagattcaagacataatctcttgtaagatctaaatagagcaaatgtaaacaaaagtgcatttttgtattcttgttaattttagatgctttcctagcttacaaaaagttctatttttgggttaaaaatcaatcaactttctgatatttccccttctgcaatgttattgttcataagaaaacacgagctgaaaatggaaatctgcagttgtttcagttgtcttgaatttctttcagtggccacatcatttccacgttttccacatccgggaggaagcctggactgtgcagccttcgggcacccggcacagacactgtgctggcaggagcttcagacacgccaagtggatggatttggattgaacgcatatgaaacaggagacgggttctcatgtgagatcaaagctcctccaaagcctgttcaagctctaagcgattctcaaatgttaccatttattaaaggtaaactacacctgttgaaggccaagttcagggcagctgttgtgatctgtgtagttaatgtatttattaatgcttgacttttaaaatcctgggcataaatagtgcagagcctcgtatgtttgtcagttcatgccgagatgaaataaatcacgcagaaagtgccagtc

SEQ ID NO: 83 - protein, 1035 aa, Homo sapiens
MGGPAAPRGAGRLRALLLALVVAGIPAGAYNLDPQRPVHFQGPADSFFGYAVLEHFHDNTRWVLVGAPKADSKYSPSVKSPGAVFKCRVHTNPDRRCTELDMARGKNRGTSCGKTCREDRDDEWMGVSLARQPKADGRVLACAHRWKNIYYEADHILPHGFCYIIPSNLQAKGRTLIPCYEEYKKKYGEEHGSCQAGIAGFFTEELVVMGAPGSFYWAGTIKVLNLTDNTYLKLNDEVIMNRRYTYLGYAVTAGHFSHPSTIDVVGGAPQDKGIGKVYIFRADRRSGTLIKIFQASGKKMGSYFGSSLCAVDLNGDGLSDLLVGAPMFSEIRDEGQVTVYINRGNGALEEQLALTGDGAYNAHFGESIASLDDLDNDGFPDVAIGAPKEDDFAGAVYIYHGDAGGIVPQYSMKLSGQKINPVLRMFGQSISGGIDMDGNGYPDVTVGAFMSDSVVLLRARPVITVDVSIFLPGSINITAPQCHDGQQPVNCLNVTTCFSFHGKHVPEEIGLNYVLMADVAKKEKGQMPRVYFVLLGETMGQVTEKLQLTYMEETCRHYVAHVKRRVQDVISPIVFEAAYSLSEHVTGEEERELPPLTPVLRWKKGQKIAQKNQTVFERNCRSEDCAADLQLQGKLLLSSMDEKTLYLALGAVKNISLNISISNLGDDAYDANVSFNVSRELFFINMWQKEEMGISCELLESDFLKCSVGFPFMRSKSKYEFSVIFDTSHLSGEEEVLSFIVTAQSGNTERSESLHDNTLVLMVPLMHEVDTSITGIMSPTSFVYGESVDAANFIQLDDLECHFQPINITLQVYNTGPSTLPGSSVSISFPNRLSSGGAEMFHVQEMVVGQEKGNCSFQKNPTPCIIPQEQENIFHTIFAFFTKSGRKVLDCEKPGISCLTAHCNFSALAKEESRTIDIYMLLNTEILKKDSSSVIQFMSRAKVKVDPALRVVEIAHGNPEEVTVVFEALHNLEPRGYVVGWIIAISLLVGILIFLLLAVLLWKMGFFRRRYKEIIEAEKNRKENEDSWDWVQKNQ

SEQ ID NO: 84 - DNA, 3588 bp, Homo sapiens
ccgcgctcggcgccctgctcgccgggcagaggggaaggcggccggctggggatgggcggcccggctgcgccgaggggcgccgggaggctccgcgcgctgctgctggcgctggtggtcgcggggatccccgcgggcgcctacaacctcgacccgcagcgccccgtgcacttccagggccccgctgactcgttcttcggctacgcagttctggagcatttccacgacaacacgcgctgggtccttgtgggcgcaccaaaggcagattccaaatacagcccttcagtgaagtctcctggggctgtgtttaagtgccgtgttcacaccaaccctgaccggagatgcaccgaactggacatggctcgagggaagaatcggggcacgtcctgcggaaagacctgccgggaagaccgcgatgatgagtggatgggggtgagcctggcccgacagcccaaggctgatggccgtgtgttggcctgtgctcatcgctggaagaacatctactatgaagccgaccacatcctaccccatggcttctgctacatcatcccctccaacctccaggccaaaggcaggacactgatcccttgctatgaagagtataagaagaagtacggagaggaacacggctcctgccaggctgggatagcgggcttcttcactgaggagctggtggtgatgggtgctccagggtcattttattgggctggaaccatcaaagtgctgaaccttacggacaacacctatttaaaactgaacgacgaagtgatcatgaacaggcggtacacctacctgggctacgcagtgaccgctggccacttctctcacccgtccaccattgatgtggtaggaggtgccccacaggacaaaggcatcggcaaggtttatattttcagagctgaccgaagatcaggcaccttaattaagatctttcaagcatcaggtaaaaagatgggctcttacttcggctcctccttgtgcgcagttgacctgaatggggacggcctctctgacctgctggtgggggcccccatgttttctgagatcagggatgagggacaggtcactgtctacatcaacagaggaaatggagccctcgaggagcagctggctctgactggggatggtgcctacaatgcgcactttggagagagcattgccagcctggacgatctggacaatgatgggttcccagatgtggccattggtgcacccaaggaggatgacttcgcaggggcggtctatatctatcatggtgatgccggtgggatagtccctcagtactcaatgaaactgtctgggcagaagataaatccagtgctccggatgtttggtcagtccatatcgggaggcattgatatggatggaaatggctatcctgatgtcactgttggagccttcatgtccgacagcgtggttcttctcagagcaaggcctgtcattacggtggatgtctccatcttcctcccgggctccatcaacatcacagcgcctcagtgtcacgacggacagcagcctgtgaactgcctgaacgtcaccacctgcttcagcttccatggcaaacacgttccagaagagattggcctgaattatgttctgatggctgacgtggccaaaaaggagaagggccagatgcccagggtctactttgtgctgctgggagagaccatgggtcaggtcacagagaagctgcagctgacttacatggaggagacgtgtcgtcactatgtggcccatgtgaagcggagggtgcaggacgtcatcagcccgatcgtgtttgaagcagcctacagcctcagtgagcatgtgactggagaggaggagagggaactgccgcctctgacaccagttctccgctggaaaaagggacaaaagattgcccaaaagaatcagactgtttttgaaaggaattgccgttcagaggactgtgccgcagacctgcagcttcagggtaaactgctgctctccagtatggatgagaaaaccctgtatctagctttgggggctgtgaagaacatctccctaaacatctctatctccaacctcggagatgatgcctatgatgccaacgtgtccttcaatgtttcccgggagctcttcttcatcaacatgtggcagaaggaggagatgggcatctcctgtgagctgctggaatcggacttcctcaaatgcagcgtgggatttcctttcatgaggtcaaagtcaaagtatgaattcagcgtgatctttgatacaagccacctgtctggggaagaggaagttctcagcttcattgttactgctcagagtggcaacacggagcgctctgaatccctgcatgacaacaccctcgtgctgatggtgccactgatgcacgaggtggacacgtccatcaccggaatcatgtctccaacctcctttgtatatggcgagtccgtggacgcagccaacttcattcagctggatgacctggagtgtcactttcagcccatcaatatcacccttcaggtctacaacactggcccaagcacccttccagggtcatctgtcagcatctctttccctaatcgactctcatctggtggtgcagagatgtttcatgtccaggaaatggtggtgggccaagagaagggaaactgctctttccagaaaaacccaactccctgcatcatccctcaagaacaagaaaatatcttccacacaatatttgcttttttcacaaagtctggaagaaaagtcttggactgtgaaaaaccaggaatttcttgcctaacagcacactgtaactttagtgctcttgctaaagaagaaagtcgtactatagacatttacatgctgctgaacacagaaatactgaaaaaggacagttcgtctgtcatccagttcatgtcccgcgccaaggtgaaggtggatcctgccctaagggtggtggaaatagctcatgggaacccagaagaggtgacggtggtcttcgaggccctgcacaatctggagccccgtggctacgtcgtggggtggatcatcgccatcagtttgttggtgggaatcctcatcttcctgctgctggccgtgctgctctggaagatgggcttctttcgccgaaggtacaaagaaattatcgaagctgagaagaaccggaaagagaatgaagacagttgggactgggtccagaaaaaccagtgagctgccacaccagtcacatgacctgatcactagcctgtcatccttggtctttgtatcttccatatttggaaaaaaaaaatcttctccagatttttcggaggccccactgatgctgttctcttcttcattctatcaagcccaggtgccagcctgaggcagccacttcggccaggtcacacgaccgggggcagcaccacttcgctttaaagactctgaactttggagagtgacagagccgagcaatatttaggatgcaacacgcatggtcaccctcaggggaaaactgttaaagtatttttataaatataagccttttatactgattattcttttatatttgtatcgatattatttctattaaatagttataattcactcaagcactgattctggcctaaaatcttggaagtccatgaatacaaattttaa

SEQ ID NO: 85 - protein, 117 aa, Homo sapiens
MPRLFFFHLLGVCLLLNQFSRAVADSWMEEVIKLCGRELVRAQIAICGMSTWSKRSLSQEDAPQTPRPVAGDFIQTVSLGISPDGGKALRTGSCFTREFLGALSKLCHPSSTKIQKP

SEQ ID NO: 86 - DNA, 889 bp, Homo sapiens
atgcctcgcctgttttttttccacctgctaggagtctgtttactactgaaccaattttccagagcagtcgcggactcatggatggaggaagttattaaattatgcggccgcgaattagttcgcgcgcagattgccatttgcggcatgagcacctggagcaaaaggtctctgagccaggaagatgctcctcagacacctagaccagtggcaggtgattttattcaaacagtctcactgggaatctcaccggacggagggaaagcactgagaacaggaagctgcttcacccgagagttccttggtgccctttccaaattgtgccatccttcatcaacaaagatacagaaaccataaatatgatgtcagaatttgttgctaatttgccacaggagctgaagttaaccctgtctgagatgcagccagcattaccacagctacaacaacatgtacctgtattaaaagattccagtcttctctttgaagaatttaagaaacttattcgcaatagacaaagtgaagccgcagacagcagtccttcagaattaaaatacttaggcttggatactcattctcgaaaaaagagacaactctacagtgcattggctaataaatgttgccatgttggttgtaccaaaagatctcttgctagattttgctgagatgaagctaattgtgcacatctcgtataatattcacacatattcttaatgacatttcactgatgcttctatcaggtcccatcaattcttagaatatctaagaatctttgttagatattaggtcccatcaattcttagaatatctaaacatctttgttgatgtttagatttttttatttgatgtgtaagaaaatgttctttgtgtgattaaatgacacatttttttgctg

SEQ ID NO: 87 - protein, 811 aa, Homo sapiens; identical to SEQ ID NO: 32

SEQ ID NO: 88 - DNA, 4933 bp, Homo sapiens; identical to SEQ ID NO: 15

SEQ ID NO: 89 - protein, 316 aa, Homo sapiens
MSDASLRSTSTMERLVARGTFPVLVRTSACRSLFGPVDHEELSRELQARLAELNAEDQNRWDYDFQQDMPLRGPGRLQWTEVDSDSVPAFYRETVQVGRCRLLLAPRPVAVAVAVSPPLEPAAESLDGLEEAPEQLPSVPVPAPASTPPPVPVLAPAPAPAPAPVAAPVAAPVAVAVLAPAPAPAPAPAPAPAPVAAPAPAPAPAPAPAPAPAPAPDAAPQESAEQGANQGQRGQEPLADQLHSGISGRPAAGTAAASANGAAIKKLSGPLISDFFAKRKRSAPEKSSGDVPAPCPSPSAAPGVGSVEQTPRKRLR

SEQ ID NO: 90 - DNA, 1511 bp, Homo sapiens
gaattccgggcacccctcgagcgagcgagctagccagcaggcatcgagggggcgcggctgccgtccggacgagacaggcgaacccgacgcagaagagtccaccaccggacagtcaggtagccgccgcgtccctcgcacacgcagagtcgggcggcgcggggtctcccttgcgcccggcctccgccctctcctcctctcctttccccttcttctcgctgtcctctcctctctcgctgcccgcgtttgcgcagccccgggccatgtccgacgcgtccctccgcagcacatccacgatggagcgtcttgtcgcccgtgggaccttcccagtactagtgcgcaccagcgcctgccgcagcctcttcgggccggtggaccacgaggagctgagccgcgagctgcaggcccgcctggccgagctgaacgccgaggaccagaaccgctgggattacgacttccagcaggacatgccgctgcggggccctggacgcctgcagtggaccgaagtggacagcgactcggtgcccgcgttctaccgcgagacggtgcaggtggggcgctgccgcctgctgctggcgccgcggcccgtcgcggtcgcggtggctgtcagcccgcccctcgagccggccgctgagtccctcgacggcctcgaggaggcgccggagcagctgcctagtgtcccggtcccggccccggcgtccaccccgcccccagtcccggtcctggctccagccccggccccggctccggctccggtcgcggctccggtcgcggctccggtcgcggtcgcggtcctggccccggccccggccccggccccggctccggctccggccccggctccagtcgcggccccggccccagccccggccccggccccggccccggcccccgccccggccccggccccggacgcggcgcctcaagagagcgccgagcagggcgcgaaccaggggcagcgcggccaggagcctctcgctgaccagctgcactcggggatttcgggacgtcccgcggccggcaccgcggccgccagcgccaacggcgcggcgatcaagaagctgtccgggcctctgatctccgatttcttcgccaagcgcaagagatcagcgcctgagaagtcgtcgggcgatgtccccgcgccgtgtccctctccaagcgccgcccctggcgtgggctcggtggagcagaccccgcgcaagaggctgcggtgagccaatttagagcccaaagagccccgagggaacctgccggggcagcggacgttggaagggcgctgggcctcggctgggaccgttcatgtagcagcaaccggcggcggctgccgcagagcagcgttcggttttgtttttaaattttgaaaactgtgcaatgtattaataacgtctttttatatctaaatgtattctgcacgagaaggtacactggtcccaaagtgtaaagctttaagagtcatttatataaaatgtttaatctctgctgaaactcagtacaaaaaaaccgggattccggcc

SEQ ID NO: 91 - protein, 931 aa, Homo sapiens
MSQSPAFGPRRGSSPRGAAGAAARRNESQDYLLMDSELGEDGCPQAPLPCYGYYPCFRGSDNRLAHRRQTVLREKGRRLANRGPAYMFSDRSTSLSIEEERFLDAAEYGNIPVVRKMLEECHSLNVNCVDYMGQNALQLAVANEHLEITELLLKKENLSRVGDALLLAISKGYVRIVEAILSHPAFAEGKRLATSPSQSELQQDDFYAYDEDGTRFSHDVTPIILAAHCQEYEIVHTLLRKGARIERPHDYFCKCNDCNQKQKHDSFSHSRSRINAYKGLASPAYLSLSSEDPVMTALELSNELAVLANIEKEFKNDYKKLSMQCKDFVVGLLDLCRNTEEVEAILNGDVETLQSGDHGRPNLSRLKLAIKYEVKKFVAHPNCQQQLLSIWYENLSGLRQQTMAVKFLVVLAVAIGLPFLALIYWFAPCSKMGKIMRGPFMKFVAHAASFTIFLGLLVMNAADRFEGTKLLPNETSTDNAKQLFRMKTSCFSWMEMLIISWVIGMIWAECKEIWTQGPKEYLFELWNMLDFGMLAIFAASFIARFMAFWHASKAQSIIDANDTLKDLTKVTLGDNVKYYNLARIKWDPSDPQIISEGLYAIAVVLSFSRIAYILPANESFGPLQISLGRTVKDIFKFMVIFIMVFVAFMIGMFNLYSYYIGAKQNEAFTTVEESFKTLFWAIFGLSEVKSVVINYNHKFIENIGYVLYGVYNVTMVIVLLNMLIAMINSSFQEIEDDADVEWKFARAKLWFSYFEEGRTLPVPFNLVPSPKSLFYLLLKLKKWISELFQGHKKGFQEDAEMNKINEEKKLGILGSHEDLSKLSLDKKQVGHNKQPSIRSSEDFHLNSFNNPPRQYQKIMKRLIKRYVLQAQIDKESDEVNEGELKEIKQDISSLRYELLEEKSQNTEDLAELIRELGEKLSMEPNQEETNR

SEQ ID NO: 92 - DNA, 4564 bp, Homo sapiens
ccgggatcttgacggagagtgcgggggatgaaggcgggagctgagggctggagagtctctgttgacatagtaactcttcagctccgtctcccttgctctccgctcttacgcttcgctaccaccagcggccccgcctgtgccctctctgcccgggcgccccagacgcatcctcgcggggtctcctcggcctgacctgctcaggtcaagatcctctttgcacccccttaagtggtgacttttccccgggccagtgggcgagccacttgcggcgggcgtctgcaccccctgcttcaccgtcgtcccctgggcaccggtctgcccaggtccagttcggccgctgacgcgaaccctccgcaccgggtccccgctggaactgcccactcggctcccccgggagcggggcccaggccagtcgggcgttcccgccatgagccagagcccggcgttcgggccccggaggggcagttctccccggggcgctgccggagccgctgcgcggcgcaacgagagccaggactatctgctcatggactcggagctgggagaagacggctgcccgcaagccccgctgccttgctacggctactacccctgcttccggggatctgacaacagactggctcaccggcggcagacagttctccgtgagaaggggagaaggttagctaatcgaggaccagcatacatgtttagtgatcgctccacaagcctatctatagaggaggaacgctttttggatgcagctgaatatggtaacatcccagtggtgcggaagatgttagaagaatgccactcactcaacgttaactgtgtggattacatgggccagaatgccctacagttggcagtggccaatgagcatctggaaattacagaacttcttctcaagaaagaaaacctctctcgagttggggatgctttgcttctagctattagtaaaggttatgttcggattgtggaagcaattctcagtcatccggcttttgctgaaggcaagaggttagcaaccagccctagccagtctgaactccagcaagatgatttttatgcctatgatgaagatgggacacggttctcccatgatgtgactccaatcattctggctgcccactgccaggaatatgaaattgtgcataccctcctgcggaagggtgctaggattgaacggcctcatgattatttctgcaagtgcaatgactgcaaccagaaacagaagcatgactcgtttagccactccagatctaggattaatgcctataaaggcctggcaagtccggcttacctgtcattgtctagtgaagatccagtcatgacggctttagaacttagcaatgaactggcagttctggccaatattgagaaagagttcaagaatgactacaaaaaactgtcaatgcagtgcaaagactttgttgttggactccttgatctgtgcagaaacactgaagaagtcgaggccattctgaatggggatgttgaaacgctccagagtggtgatcacggtcgcccaaatctcagccgtttaaaacttgccattaaatatgaagtaaaaaaatttgtagctcatccaaactgccaacagcaacttctctccatttggtatgagaatctttctggtttacgacagcagacaatggcggtcaagttccttgtggtccttgctgttgccattggactgcccttcctggctctcatttactggtttgctccatgcagcaagatggggaagataatgcgtggaccattcatgaagtttgtagcacacgcagcctccttcaccatttttctgggactgctagtcatgaatgcagctgacagatttgaaggcacaaaactccttcctaatgaaaccagcacagataatgcaaaacagctgttcaggatgaaaacatcctgcttctcatggatggagatgctcattatatcctgggtaataggcatgatatgggctgaatgtaaagaaatctggactcagggccccaaggaatatttgtttgagttgtggaacatgcttgattttggtatgttagcaattttcgcagcatcattcattgcgagattcatggcattttggcatgcttccaaagcccagagcatcattgacgcaaatgatactttgaaggacttgacgaaagtaacattgggagacaatgtgaaatactacaatttggccaggataaagtgggacccctctgatcctcaaataatatctgaaggtctttatgcaattgctgtagttttaagtttctctaggatagcttatattttaccagcaaatgaaagctttggacctctgcagatatcacttggaagaacagtcaaagacatcttcaagttcatggtcatattcattatggtgtttgtggcctttatgattggaatgttcaatctctactcctactacattggtgcaaaacaaaatgaagccttcacaacagttgaagagagttttaagacactgttctgggctatatttggactttctgaagtgaaatcagtggtcatcaactataaccacaaattcattgaaaacattggttacgttctttatggagtctataatgttacgatggtcattgttttgctaaatatgttaattgccatgatcaacagttcattccaggaaattgaggatgacgctgatgtggagtggaaatttgcaagggccaaactctggttttcctactttgaggagggcagaacacttcctgtacccttcaatctggtgccgagtccaaagtccctgttttatctcttactgaagcttaaaaaatggatttctgagctgttccagggccataaaaaaggtttccaggaagatgcagagatgaacaagataaatgaagaaaagaaacttggaattttaggaagtcatgaagacctttcaaaattatcacttgacaaaaaacaggttgggcacaataaacaaccaagtataaggagctcagaagatttccatctaaatagtttcaataatcctccaagacaatatcagaaaataatgaaaaggctcattaaaagatatgtactgcaggcccagatagataaggagagtgatgaagtgaacgaaggggaactgaaggaaattaagcaggacatctcaagtctccgctatgaactccttgaagaaaaatctcagaatacagaagacctagcagaacttattagagaacttggagagaaattatccatggaaccaaatcaagaggaaaccaatagataatgcgaagacttccttagaaattcatatttatttgtccacttgaagccatattattttctgatttattttcttaagtgccaatgggcccaccttttaaacaagaaaacgttaaataacttgggccatcctatcatctggagccctagtatctaatttttttggtgattaaactccattgttcagggtaaaggctgtagataatgaggaaaattatgcccagttgtttggtgcttgttttataaactgctttcttggatataactaactcttgtgatgatgtcattgccatgtagtgtctgcctgaaaatgggtcccagcggacaggggctgacccacgttactccccatgcggtttttcctctgaagtttatttcaggttccttcttgcctgctctgtggatcccctgctggggactcccagctctgaaatttgggaaaaagtagcccatgggcctttagaatgctttaatcctttctttagaatgctgtttaaacaccatttaccctacttatccctcaatgcacatgattgataccgttcatacaaaatggtcttacatctatgtaaaattttctgattcatctatttgaaaacattacacttaacaatgaaaaaagtttttcctccactgaaccctggaaacatggtccagttttgtgtgtgtgcgtgtgtgtaaatgtgtacacacagacataaagtacttgccctatttagtttgtggctaatgtggacacacaaaagctctttatgttataaatttttattgtcactaaaaaattttactgtctaaataagtaccttttattggagaaaaatcaaaaccccaaacaaacactgtggttgtttggttccattatagcacaattttgtgccatttctgggagcatttacagatgaatccccacacttagccattgaatgtaaaggggaaaaataaggtgagaatttgtaaatacttatctgttattttcaatatgttctatccttctacccaaatatataaaacaggaatttgcattcatgtgcatttaccaagaggttgttgttgttacttactgatcatgtgaagtggtgtcttaaacaactaaaagcgatgaaggttcatatgtttactcaaagaccattggcattcagaggatgctggacattaactggaactgctacttccaattcaataatgggagatttcaaatgcaaatctttaacttcatcttaaagatgaaatggttgcagaaaatctgtttagctccaactttggcttaatttaaatcaaagaacatttatgtaaccagatcagaaaatacagctgaaaatttggaattcgagctcggtacccgggg

SEQ ID NO: 93 - DNA, 1565 bp, Homo sapiens
gggcaggtttcaaaatcaggtaagaaaaccatcatcattaactgagcaccagctgtgctaagcctgccacgggcgtatccttgcagcctcacaacagtgggaggtctgtatcctgaatgtcctcattttacagatgaggacattgaggagaagagacttacccaggctcacacagcagctcagcctgttccaggcgctggtcagtgcgtgttctttgccaccagcctgtcactccagtggcagctccagaaacggaggctgttgcttttatccctaaactgcatccacagagaagccccaagaaggaggttggggccagctcataaaaagcctgaatgccaagccaaggagtggatgcctccagtcatatttagaacaaagtcaagtataaatttacagagaaaaaattctaagacagttggatgttgtcctgttggtgaggaagggaaaggtttttcttgtagggaactggaaccagcccactactgcacgcttgtgagctgtcatggaaacctgatccccaacagcttttgaggttgtttgtttgtttgtttgtttacctgtcttgggctttgttgcttttggcaaaaggtacttctaacaagggagggcctggactgagggggaccaggtcttcttgctgacctcgtctacaaaggcaaaggaaggcaaaggaagctgtctcgggtgtttctgaacaacgtgactcatgaggggctttggctacctcttgcgttccccctagagatgtccaggccttacatttaatcggctttctctgcggtggggtagagaatggagctcccgccttgcgggcagtgctaaaggtggagctgggggattttcctgggaatgatttgagggctcttgaaagcccatgtgttccaaagcgtctttaactctgggatagcattggaagccgctgtcatgacaggacatggcactggatggctggcagagagccctggctgggagttagggagccctgggttggaatccagccccacctcttttatgccacaggtttggtcaagttctctcccgctcagggtagggctgtgaactccctcttacagctaagaacatgcagcttagtgaggacaagacccttctagagctttacccctaatccccccccaggagccccgaggccggcattattcctccccattacaggtgatgagccccaaattcagagagcttaagcaacctgctcagggtcacgtctccaacaggcagtagagtcaaggtataaaccaggtctgtttttgtaccagagtcccagactaactgttggtaggaatcttgtaaccagtcatgttttcttccttgttttggccgctgggaagctcaaagtcaaattcgagaccctttttttttccaattgtgctgagtctcctactagactcgcttcattctagctttctgcttttgcctttaccctaatctttttatttttatgctattgtactttatttttgtaagttgccgagatatctgttttgcaacaagatgggctatatctaaataaagacatgatcaaaggaaaaaaaaaaaaaaaaaaa

SEQ ID NO: 94 - protein, 969 aa, Homo sapiens
MPPRAPPAPGPRPPPRAAAATDTAAGAGGAGGAGGAGGPGFRPLAPRPWRWLLLLALPAACSAPPPRPVYTNHWAVQVLGGPAEADRVAAAHGYLNLGQIGNLEDYYHFYHSKTFKRSTLSSRGPHTFLRMDPQVKWLQQQEVKRRVKRQVRSDPQALYFNDPIWSNMWYLHCGDKNSRCRSEMNVQAAWKRGYTGKNVVVTILDDGIERNHPDLAPNYDSYASYDVNGNDYDPSPRYDASNENKHGTRCAGEVAASANNSYCIVGIAYNAKIGGIRMLDGDVTDVVEAKSLGIRPNYIDIYSASWGPDDDGKTVDGPGRLAKQAFEYGIKKGRQGLGSIFVWASGNGGREGDYCSCDGYTNSIYTISVSSATENGYKPWYLEECASTLATTYSSGAFYERKIVTTDLRQRCTDGHTGTSVSAPMVAGIIALALEANSQLTWRDVQHLLVKTSRPAHLKASDWKVNGAGHKVSHFYGFGLVDAEALVVEAKKWTAVPSQHMCVAASDKRPRSIPLVQVLRTTALTSACAEHSDQRVVYLEHVVVRTSISHPRRGDLQIYLVSPSGTKSQLLAKRLLDLSNEGFTNWEFMTVHCWGEKAEGQWTLEIQDLPSQVRNPEKQGKLKEWSLILYGTAEHPYHTFSAHQSRSRMLELSAPELEPPKAALSPSQVEVPEDEEDYTAQSTPGSANILQTSVCHPECGDKGCDGPNADQCLNCVHFSLGSVKTSRKCVSVCPLGYFGDTAARRCRRCHKGCETCSSRAATQCLSCRRGFYHHQEMNTCVTLCPAGFYADESQKNCLKCHPSCKKCVDEPEKCTVCKEGFSLARGSCIPDCEPGTYFDSELIRCGECHHTCGTCVGPGREECIHCAKNFHFHDWKCVPACGEGFYPEEMPGLPHKVCRRCDENCLSCAGSSRNCSRCKTGFTQLGTSCITNHTCSNADETFCEMVKSNRLCERKLFIQFCCRTCLLAG

SEQ ID NO: 95 - DNA, 4553 bp, Homo sapiens
tcgcgggccgaggacgcctctggggcggcaccgcgtcccgagagccccagaagtcggcggggaagtttccccggtggggggcgtttcgggcctcccggacggctctcggccccggagcccggtcgcaggagcgcgggcccgggggcgggaacgcgccgcggccgcctcctcctccccggctcccgcccgcggcggtgttggcggcggcggtggcggcggcggcggcgcttccccggcgcggagcggctttaaaaggcggcactccaccccccggcgcactcgcagctcgggcgccgcgcgagcctgtcgccgctatgcctccgcgcgcgccgcctgcgcccgggccccggccgccgccccgggccgccgccgccaccgacaccgccgcgggcgcggggggcgcggggggcgcggggggcgccggcgggcccgggttccggccgctcgcgccgcgtccctggcgctggctgctgctgctggcgctgcctgccgcctgctccgcgcccccgccgcgccccgtctacaccaaccactgggcggtgcaagtgctgggcggcccggccgaggcggaccgcgtggcggcggcgcacgggtacctcaacttgggccagattggaaacctggaagattactaccatttttatcacagcaaaacctttaaaagatcaaccttgagtagcagaggccctcacaccttcctcagaatggacccccaggtgaaatggctccagcaacaggaagtgaaacgaagggtgaagagacaggtgcgaagtgacccgcaggccctttacttcaacgaccccatttggtccaacatgtggtacctgcattgtggcgacaagaacagtcgctgccggtcggaaatgaatgtccaggcagcgtggaagaggggctacacaggaaaaaacgtggtggtcaccatccttgatgatggcatagagagaaatcaccctgacctggccccaaattatgattcctacgccagctacgacgtgaacggcaatgattatgacccatctccacgatatgatgccagcaatgaaaataaacacggcactcgttgtgcgggagaagttgctgcttcagcaaacaattcctactgcatcgtgggcatagcgtacaatgccaaaataggaggcatccgcatgctggacggcgatgtcacagatgtggtcgaggcaaagtcgctgggcatcagacccaactacatcgacatttacagtgccagctgggggccggacgacgacggcaagacggtggacgggcccggccgactggctaagcaggctttcgagtatggcattaaaaagggccggcagggcctgggctccattttcgtctgggcatctgggaatggcgggagagagggggactactgctcgtgcgatggctacaccaacagcatctacaccatctccgtcagcagcgccaccgagaatggctacaagccctggtacctggaagagtgtgcctccaccctggccaccacctacagcagtggggccttttatgagcgaaaaatcgtcaccacggatctgcgtcagcgctgtaccgatggccacactgggacctcagtctctgcccccatggtggcgggcatcatcgccttggctctagaagcaaacagccagttaacctggagggacgtccagcacctgctagtgaagacatcccggccggcccacctgaaagcgagcgactggaaagtgaacggcgcgggtcataaagttagccatttctatggatttggtttggtggacgcagaagctctcgttgtggaggcaaagaagtggacagcagtgccatcgcagcacatgtgtgtggccgcctcggacaagagacccaggagcatccccttagtgcaggtgctgcggactacggccctgaccagcgcctgcgcggagcactcggaccagcgggtggtctacttggagcacgtggtggttcgcacctccatctcacacccacgccgaggagacctccagatctacctggtttctccctcgggaaccaagtctcaacttctggcaaagaggttgctggatctttccaatgaagggtttacaaactgggaattcatgactgtccactgctggggagaaaaggctgaagggcagtggaccttggaaatccaagatctgccatcccaggtccgcaacccggagaagcaagggaagttgaaagaatggagcctcatactgtatggcacagcagagcacccgtaccacaccttcagtgcccatcagtcccgctcgcggatgctggagctctcagccccagagctggagccacccaaggctgccctgtcaccctcccaggtggaagttcctgaagatgaggaagattacacagctcaatccaccccaggctctgctaatattttacagaccagtgtgtgccatccggagtgtggtgacaaaggctgtgatggccccaatgcagaccagtgcttgaactgcgtccacttcagcctggggagtgtcaagaccagcaggaagtgcgtgagtgtgtgccccttgggctactttggggacacagcagcaagacgctgtcgccggtgccacaaggggtgtgagacctgctccagcagagctgcgacgcagtgcctgtcttgccgccgcgggttctatcaccaccaggagatgaacacctgtgtgaccctctgtcctgcaggattttatgctgatgaaagtcagaaaaattgccttaaatgccacccaagctgtaaaaagtgcgtggatgaacctgagaaatgtactgtctgtaaagaaggattcagccttgcacggggcagctgcattcctgactgtgagccaggcacctactttgactcagagctgatcagatgtggggaatgccatcacacctgcggaacctgcgtggggccaggcagagaagagtgcattcactgtgcgaaaaacttccacttccacgactggaagtgtgtgccagcctgtggtgagggcttctacccagaagagatgccgggcttgccccacaaagtgtgtcgaaggtgtgacgagaactgcttgagctgtgcaggctccagcaggaactgtagcaggtgtaagacgggcttcacacagctggggacctcctgcatcaccaaccacacgtgcagcaacgctgacgagacattctgcgagatggtgaagtccaaccggctgtgcgaacggaagctcttcattcagttctgctgccgcacgtgcctcctggccgggtaagggtgcctagctgcccacagagggcaggcactcccatccatccatccgtccaccttcctccagactgtcggccagagtctgtttcaggagcggcgccctgcacctgacagctttatctccccaggagcagcatctctgagcacccaagccaggtgggtggtggctcttaaggaggtgttcctaaaatggtgatatcctctcaaatgctgcttgttggctccagtcttccgacaaactaacaggaacaaaatgaattctgggaatccacagctctggctttggagcagcttctgggaccataagtttactgaatcttcaagaccaaagcagaaaagaaaggcgcttggcatcacacatcactcttctccccgtgcttttctgcggctgtgtagtaaatctccccggcccagctggcgaaccctgggccatcctcacatgtgacaaagggccagcagtctacctgctcgttgcctgccactgagcagtctggggacggtttggtcagactataaataagataggtttgagggcataaaatgtatgaccactggggccggagtatctatttctacatagtcagctacttctgaaactgcagcagtggcttagaaagtccaattccaaagccagaccagaagattctatcccccgcagcgctctcctttgagcaagccgagctctccttgttaccgtgttctgtctgtgtcttcaggagtctcatggcctgaacgaccacctcgacctgatgcagagccttctgaggagaggcaacaggaggcattctgtggccagccaaaaggtaccccgatggccaagcaattcctctgaacaaaatgtaaagccagccatgcattgttaatcatccatcacttcccattttatggaattgcttttaaaatacatttggcctctgcccttcagaagactcgtttttaaggtggaaactcctgtgtctgtgtatattacaagcctacatgacacagttggatttattctgccaaacctgtgtaggcattttataagctacatgttctaatttttaccgatgttaattattttgacaaatatttcatatattttcattgaaatgcacagatctgcttgatcaattcccttgaatagggaagtaacatttgccttaaattttttcgacctcgtctttctccatattgtcctgctcccctgtttgacgacagtgcatttgccttgtcacctgtgagctggagagaacccagatgttgtttattgaatctacaactctgaaagagaaatcaatgaagcaagtacaatgttaaccctaaattaataaaagagttaacatcccatggc

SEQ ID NO: 96 - protein, 202 aa, Homo sapiens [sequence omitted]

SEQ ID NO: 97 - DNA, 2383 bp, Homo sapiens
ggggctaccgcgcctttgcttcctggcgcacgcggagcctcctggagcctgccaccatcctgcctactacgtgctgccctgcgcccgcagccatgtgccgcaccctggccgccttccccaccacctgcctggagagagccaaagagttcaagacacgtctggggatctttcttcacaaatcagagctgggctgcgatactgggagtactggcaagtccgagtggggcagtaaacacagcaaagagaatagaaacttctcagaagatgtgctggggtggagagagtcgttcgacctgctgctgagcagtaaaaatggagtggctgccttccacgctttcctgaagacagagttcagtgaggagaacctggagttctggctggcctgtgaggagttcaagaagatccgatcagctaccaagctggcctccagggcacaccagatctttgaggagttcatttgcagtgaggcccctaaagaggtcaacattgaccatgagacccgcgagctgacgaggatgaacctgcagactgccacagccacatgctttgatgcggctcaggggaagacacgtaccctgatggagaaggactcctacccacgcttcctgaagtcgcctgcttaccgggacctggctgcccaagcctcagccgcctctgccactctgtccagctgcagcctggacgagccctcacacacctgagtctccacggcagtgaggaagccagccgggaagagaggttgagtcacccatccccgaggtggctgcccctgtgtgggaggcaggttctgcaaagcaagtgcaagaggacaaaaaaaaaaaaaaaaaaaaaaaaaatgcgctccagcagcctgtttgggaagcagcagtctctccttcagatactgtgggactcatgctggagaggagccgcccacttccaggacctgtgaataagggctaatgatgagggttggtggggctctctgtggggcaaaaaggtggtatgggggttagcactggctctcgttctcaccggagaaggaagtgttctagtgtggtttaggaaacatgtggataaagggaaccatgaaaatgagaggaggaaagacatccagatcagctgttttgcctgttgctcagttgactctgattgcatcctgttttcctaattcccagactgttctgggcacggaagggaccctggatgtggagtcttcccctttggccctcctcactggcctctgggctagcccagagtcccttagcttgtacctcgtaacactcctgtgtgtctgtccagccttgcagtcatgtcaaggccagcaagctgatgtgactcttgccccatgcgagatatttatacctcaaacactggcctgtgagccctttccaagtcagtggagagccctgaaaggaggctcacttgaatccagctcagtgctctgggtggccccctgcaggtggcccctgaccctgcgttgcagcagggtccacctgtgagcaggcccgccctggggcctcttcctggatgtgccctctctgagttctgtgctgtctcttggaggcagggcccaggagaacaaagtgtggaggcctcggggagtggcttttccagctctcatgccccgcagtgtggaacaaggcagaaaaggatcctaggaaataagtctcttggcggtccctgagagtcctgctgaaatccagccagtgttttttgtggtatgagaacaggcaaaaagagatgccccgagatagaaggggagccttgtgtttctttcctgcagacgtgagatgaacactggagtgggcagaggtggcmcaggaccatggcacccttagagtgcagaagctggggggagaggctgcttcgaagggcaggactggggatacctgcctgtcacctcagggcatcactgaacaaacatttcctgatggsaactcctgcggcagagcccaggctggggaagtgaactacccagggcagcccctttgtggcccaggataatcaacactgttctctctgtaccatgagctcctccaggagattatttaagtgtattgtatcattggttttctgtgattgtcataacattgtttttgttattgttggtgctgttgttatttattattgtaatttcagtttgcctctactggagaatctcagcaggggtttcagcctgactgtctccctttctctaccagactctacctctgaatgtgctgggaacctcttggagcctgtcaggaactcctcactgtttaaatatttatttattgtgacaaatggagctggtttcctagatatgaatgatgtttgcaatccccattttcctgtttcagcatgttatattcttataaaataaaagcaaaagtcaaatatgaaaaaaaaaaaaaaaaaaaaa

SEQ ID NO: 98 - protein, 572 aa, Homo sapiens
MSYQGKKSIPHITSDRLLIKGGRIINDDQSLYADVYLEDGLIKQIGENLIVPGGVKTIEANGRMVIPGGIDVNTYLQKPSQGMTAADDFFQGTRAALVGGTTMIIDHVVPEPGSSLLTSFEKWHEAADTKSCCDYSLHVDITSWYDGVREELEVLVQDKGVNSFQVYMAYKDVYQMSDSQLYEAFTFLKGLGAVILVHAENGDLIAQEQKRILEMGITGPEGHALSRPEELEAEAVFRAITIAGRINCPVYITKVMSKSAADIIALARKKGPLVFGEPIAASLGTDGTHYWSKNWAKAAAFVTSPPLSPDPTTPDYLTSLLACGDLQVTGSGHCPYSTAQKAVGKDNFTLIPEGVNGIEERMTVVWDKAVATGKMDENQFVAVTSTNAAKIFNLYPRKGRIAVGSDADVVIWDPDKLKTITAKSHKSAVEYNIFEGMECHGSPLVVISQGKIVFEDGNINVNKGMGRFIPRKAFPEHLYQRVKIRNKVFGLQGVSRGMYDGPVYEVPATPKYATPAPSAKSSPSKHQPPPIRNLHQSNFSLSGAQIDDNNPRRTGHRIVAPPGGRSNITSLG

SEQ ID NO: 99 - DNA, 2928 bp, Homo sapiens
ccgatccgggcggtgctggcagccggagcggcggcgggcgggccgagcagccggggcagccgcgcgtgggcatccacgggcgccgagcctccgtccgtgtctctatccctcccgggcctttgtcagcgcgcccgctgggagcggggccgagagcgccggttccagtcagacagccccgcaggtcagcggccgggccgagggcgccagagggggccatgtcgtaccagggcaagaagagcatcccgcacatcacgagtgaccgactcctcatcaaaggtggacggatcatcaacgatgaccaatccctttatgctgacgtctacctggaggatggacttatcaaacaaataggagagaacttaatcgttcctggtggagtgaagaccattgaagccaacgggcggatggttattcccggaggtattgatgtcaacacgtacctgcagaagccctcccaggggatgactgcggctgatgacttcttccaagggaccagggcggcactggtgggcgggaccacgatgatcattgaccatgttgttcctgaacctgggtccagcctactgacctctttcgagaagtggcacgaagcagctgacaccaaatcctgctgtgattactccctccacgtggacatcacaagctggtacgatggcgttcgggaggagctggaggtgctggtgcaggacaaaggcgtcaattccttccaagtctacatggcctataaggatgtctaccaaatgtccgacagccagctctatgaagcctttaccttccttaagggcctgggagctgtgatcttggtccatgcagaaaatggagatttgatagctcaggaacaaaagcggatcctggagatgggcatcacgggtcccgagggccatgccctgagcagacctgaagagctggaggccgaggcggtgttccgggccatcaccattgcgggccggatcaactgccctgtgtacatcaccaaggtcatgagcaagagtgcagccgacatcatcgctctggccaggaagaaagggcccctagtttttggagagcccattgccgccagcctggggaccgatggcacccattactggagcaagaactgggccaaggctgcggcgttcgtgacttcccctcccctgagcccggaccctaccacgcccgactacttgacctccctactggcctgtggggacttgcaggtcacaggcagcggccactgtccctacagcactgcccagaaggcggtgggcaaggacaactttaccctgatccccgagggtgtcaacgggatagaggagcggatgacggtcgtctgggacaaggcggtggctactggcaaaatggatgagaaccagtttgtcgctgtcaccagcaccaatgcagccaagatctttaacctgtacccaaggaaagggcggattgccgtgggctcggatgccgacgtggtcatctgggaccccgacaagttgaagaccataacagccaaaagtcacaagtcggcggtggagtacaacatcttcgagggtatggagtgccacggctccccactagtggtcatcagccagggcaagatcgtctttgaagacggaaacatcaacgtcaacaagggcatgggccgcttcattccgcggaaggcgttcccggagcacctgtaccagcgcgtcaaaatcaggaataaggtttttggattgcaaggggtttccaggggcatgtatgacggtcctgtgtacgaggtaccagctacacccaaatatgcaactcccgctccttcagccaaatcttcgccttctaaacaccagcccccacccatcagaaacctccaccagtccaacttcagcttatcaggtgcccagatagatgacaacaatcccaggcgcaccggccaccgcatcgtggcgccccctggtggccgctccaacatcaccagcctcggttgaacgtggatgcgcggaggagctagcctgaaggattctgggaatcatgtccatcccttttcctgtcagtgtttttgaaacccacagttttagttggtgctgatggagggagggggaagtcgaaggatgctctttcccttttctgtttaggaagaagtggtactagtgtggtgtgtttgcttggaaattccttgccccacagttgtgttcatgctgaatccacctcggagcatggtgttttcattcccccttcctagtgaaccacaggttttagcattgtcttgttctgtcccttccacttctaactccactggctccatgattctctgagtggtggttcctttgcaccctgtagatgttctaggatagttgatgcatgttactaaattacgtatgcaagtctgtgagtgcgtctgaggggacatcgccaaggactgactgagacacgatgccgagacctcaagccctgaggggcagtcccaaaacccttacagtgaagatgtttactcattgcccccacctctggtccacactagaaagaagctcgccccacctccacctgtgagatccgtgaattctcggaatggcaggggaagccttgcactaggttgcagagaagcatcctccacatcctgtgtcagaaaccctggtctccgtggcacttgtaactcaccgtgctgtcttctggtctgtgtgtgttcttcaagccagctctaggcttcaggccgagccaggttcacactcagaaagaggtctccccatccccattcggggctgacgatggggggctgatggctgcccctgcgtggcctgagtcctggtccctctgaggcagttgacggggcagtcagatttttaaagttttgtacaaagttttcctttgtaatcactcccatttttacttaacaaccaacttgttgtggctcttatttctgaattcaaagcttgtgaaaaaataaagaaaatgaactgcccactgaaaaaaaaaaaaaaaaaa

SEQ ID NO: 100 - protein, 2871 aa, Homo sapiens
MSCNGGSHPRINTLGRMIRAESGPDLRYEVTSGGGGTSRMYYSRRGVITDQNSDGYCQTGTMSRHQNQNTIQELLQNCSDCLMRAELIVQPELKYGDGIQLTRSRELDECFAQANDQMEILDSLIREMRQMGQPCDAYQKRLLQLQEQMRALYKAISVPRVRRASSKGGGGYTCQSGSGWDEFTKHVTSECLGWMRQQRAEMDMVAWGVDLASVEQHINSHRGIHNSIGDYRWQLDKIKADLREKSAIYQLEEEYENLLKASFERMDHLRQLQNIIQATSREIMWINDCEEEELLYDWSDKNTNIAQKQEAFSIRMSQLEVKEKELNKLKQESDQLVLNQHPASDKIEAYMDTLQTQWSWILQITKCIDVHLKENAAYFQFFEEAQSTEAYLKGLQDSIRKKYPCDKNMPLQHLLEQIKELEKEREKILEYKRQVQNLVNKSKKIVQLKPRNPDYRSNKPIILRALCDYKQDQKIVHKGDECILKDNNERSKWYVTGPGGVDMLVPSVGLIIPPPNPLAVDLSCKIEQYYEAILALWNQLYINMKSLVSWHYCMIDIEKIRAMTIAKLKTMRQEDYMKTIADLELHYQEFIRNSQGSEMFGDDDKRKIQSQFTDAQKHYQTLVIQLPGYPQHQTVTTTEITHHGTCQDVNHNKVIETNRENDKQETWMLMELQKIRRQIEHCEGRMTLKNLPLADQGSSHHITVKINELKSVQNDSQAIAEVLNQLKDMLANFRGSEKYCYLQNEVFGLFQKLENINGVTDGYLNSLCTVRALLQAILQTEDMLKVYEARLTEEETVCLDLDKVEAYRCGLKKIKNDLNLKKSLLATMKTELQKAQQIHSQTSQQYPLYDLDLGKFGEKVTQLTDRWQRIDKQIDFRLWDLEKQIKQLRNYRDNYQAFCKWLYDRKRRQDSLESMKFGDSNTVMRFLNEQKNLHSEISGKRDKSEEVQKIAELCANSIKDYELQLASYTSGLETLLNIPIKRTMIQSPSGVILQEAADVHARYIELLTRSGDYYRFLSEMLKSLEDLKLKNTKIEVLEEELRLARDANSENCNKNKFLDQNLQKYQAECSQFKAKLASLEELKRQAELDGKSAKQNLDKCYGQIKELNEKITRLTYEIEDEKRRRKSVEDRFDQQKNDYDQLQKARQCEKENLGWQKLESEKAIKEKEYEIERLRVLLQEEGTRKREYENELAKVRNHYNEEMSNLRNKYETEINITKTTIKEISMQKEDDSKNLRNQLDRLSRENRDLKDEIVRLNDSILQATEQRRRAEENALQQKACGSEIMQKKQHLEIELKQVMQQRSEDNARHKQSLEEAAKTIQDKNKEIERLKAEFQEEAKRRWEYENELSKVRNNYDEEIISLKNQFETEINITKTTIHQLTMQKEEDTSGYRAQIDNLTRENRSLSEEIKRLKNTLTQTTENLRRVEEDIQQQKATGSEVSQRKQQLEVELRQVTQMRTEESVRYKQSLDDAAKTIQDKNKEIERLKQLIDKETNDRKCLEDENARLQRVQYDLQKANSSATETINKLKVQEQELTRLRIDYERVSQERTVKDQDITRFQNSLKELQLQKQKVEEELNRLKRTASEDSCKRKKLEEELEGMRRSLKEQAIKITNLTQQLEQASIVKKRSEDDLRQQRDVLDGHLREKQRTQEELRRLSSEVEALRRQLLQEQESVKQAHLRNEHFQKAIEDKSRSLNESKIEIERLQSLTENLTKEHLMLEEELRNLRLEYDDLRRGRSEADSDKNATILELRSQLQISNNRTLELQGLINDLQRERENLRQEIEKFQKQALEASNRIQESKNQCTQVVQERESLLVKIKVLEQDKARLQRLEDELNRAKSTLEAETRVKQRLECEKQQIQNDLNQWKTQYSRKEEAIRKIESEREKSEREKNSLRSEIERLQAEIKRIEERCRRKLEDSTRETQSQLETERSRYQREIDKLRQRPYGSHRETQTECEWTVDTSKLVFDGLRKKVTAMQLYECQLIDKTTLDKLLKGKKSVEEVASEIQPFLRGAGSIAGASASPKEKYSLVEAKRKKLISPESTVMLLEAQAATGGIIDPHRNEKLTVDSAIARDLIDFDDRQQIYAAEKAITGFDDPFSGKTVSVSEAIKKNLIDRETGMRLLEAQIASGGVVDPVNSVFLPKDVALARGLIDRDLYRSLNDPRDSQKNFVDPVTKKKVSYVQLKERCRIEPHTGLLLLSVQKRSMSFQGIRQPVTVTELVDSGILRPSTVNELESGQISYDEVGERIKDFLQGSSCIAGIYNETTKQKLGIYEAMKIGLVRPGTALELLEAQAATGFIVDPVSNLRLPVEEAYKRGLVGIEFKEKLLSAERAVTGYNDPETGNIISLFQAMNKELIEKGHGIRLLEAQIATGGIIDPKESHRLPVDIAYKRGYFNEELSEILSDPSDDTKGFFDPNTEENLTYLQLKERCIKDEETGLCLLPLKEKKKQVQTSQKNTLRKRRVVIVDPETNKEMSVQEAYKKGLIDYETFKELCEQECEWEEITITGSDGSTRVVLVDRKTGSQYDIQDAIDKGLVDRKFFDQYRSGSLSLTQFADMISLKNGVGTSSSMGSGVSDDVFSSSRHESVSKISTISSVRNLTIRSSSFSDTLEESSPIAAIFDTENLEKISITEGIERGIVDSITGQRLLEAQACTGGIIHPTTGQKLSLQDAVSQGVIDQDMATSVKPAQKAFIGFEGVKGKKKMSAAEAVKEKWLPYEAGQRFLEFQYLTGGLVDPEVHGRISTEEAIRKGFIDGRAAQRLQDTSSYAKILTCPKTKLKISYKDAINRSMVEDITGLRLLEAASVSSKGLPSPYNMSSAPGSRSGSRSGSRSGSRSGSRSGSRRGSFDATGNSSYSYSYSFSSSSIGH

SEQ ID NO: 101 - DNA, 9588 bp, Homo sapiens
ccgaccaacaccaacacccagctccgacgcagctcctctgcgcccttgccgccctccgagccacagctttcctcccgctcctgcccccggcccgtcgccgtctccgcgctcgcagcggcctcgggagggcccaggtagcgagcagcgacctcgcgagccttccgcactcccgcccggttccccggccgtccgcctatccttggccccctccgctttctccgcgccggcccgcctcgcttatgcctcggcgctgagccgctctcccgattgcccgccgacatgagctgcaacggaggctcccacccgcggatcaacactctgggccgcatgatccgcgccgagtctggcccggacctgcgctacgaggtgaccagcggcggcgggggcaccagcaggatgtactattctcggcgcggcgtgatcaccgaccagaactcggacggctactgtcaaaccggcacgatgtccaggcaccagaaccagaacaccatccaggagctgctgcagaactgctccgactgcttgatgcgagcagagctcatcgtgcagcctgaattgaagtatggagatggaatacaactgactcggagtcgagaattggatgagtgttttgcccaggccaatgaccaaatggaaatcctcgacagcttgatcagagagatgcggcagatgggccagccctgtgatgcttaccagaaaaggcttcttcagctccaagagcaaatgcgagccctttataaagccatcagtgtccctcgagtccgcagggccagctccaagggtggtggaggctacacttgtcagagtggctctggctgggatgagttcaccaaacatgtcaccagtgaatgtttggggtggatgaggcagcaaagggcggagatggacatggtggcctggggtgtggacctggcctcagtggagcagcacattaacagccaccggggcatccacaactccatcggcgactatcgctggcagctggacaaaatcaaagccgacctgcgcgagaaatctgcgatctaccagttggaggaggagtatgaaaacctgctgaaagcgtcctttgagaggatggatcacctgcgacagctgcagaacatcattcaggccacgtccagggagatcatgtggatcaatgactgcgaggaggaggagctgctgtacgactggagcgacaagaacaccaacatcgctcagaaacaggaggccttctccatacgcatgagtcaactggaagttaaagaaaaagagctcaataagctgaaacaagaaagtgaccaacttgtcctcaatcagcatccagcttcagacaaaattgaggcctatatggacactctgcagacgcagtggagttggattcttcagatcaccaagtgcattgatgttcatctgaaagaaaatgctgcctactttcagttttttgaagaggcgcagtctactgaagcatacctgaaggggctccaggactccatcaggaagaagtacccctgcgacaagaacatgcccctgcagcacctgctggaacagatcaaggagctggagaaagaacgagagaaaatccttgaatacaagcgtcaggtgcagaacttggtaaacaagtctaagaagattgtacagctgaagcctcgtaacccagactacagaagcaataaacccattattctcagagctctctgtgactacaaacaagatcagaaaatcgtgcataagggggatgagtgtatcctgaaggacaacaacgagcgcagcaagtggtacgtgacgggcccgggaggcgttgacatgcttgttccctctgtggggctgatcatccctcctccgaacccactggccgtggacctctcttgcaagattgagcagtactacgaagccatcttggctctgtggaaccagctctacatcaacatgaagagcctggtgtcctggcactactgcatgattgacatagagaagatcagggccatgacaatcgccaagctgaaaacaatgcggcaggaagattacatgaagacgatagccgaccttgagttacattaccaagagttcatcagaaatagccaaggctcagagatgtttggagatgatgacaagcggaaaatacagtctcagttcaccgatgcccagaagcattaccagaccctggtcattcagctccctggctatccccagcaccagacagtgaccacaactgaaatcactcatcatggaacctgccaagatgtcaaccataataaagtaattgaaaccaacagagaaaatgacaagcaagaaacatggatgctgatggagctgcagaagattcgcaggcagatagagcactgcgagggcaggatgactctcaaaaacctccctctagcagaccaggggtcttctcaccacatcacagtgaaaattaacgagcttaagagtgtgcagaatgattcacaagcaattgctgaggttctcaaccagcttaaagatatgcttgccaacttcagaggttctgaaaagtactgctatttacagaatgaagtatttggactatttcagaaactggaaaatatcaatggtgttacagatggctacttaaatagcttatgcacagtaagggcactgctccaggctattctccaaacagaagacatgttaaaggtttatgaagccaggctcactgaggaggaaactgtctgcctggacctggataaagtggaagcttaccgctgtggactgaagaaaataaaaaatgacttgaacttgaagaagtcgttgttggccactatgaagacagaactacagaaagcccagcagatccactctcagacttcacagcagtatccactttatgatctggacttgggcaagttcggtgaaaaagtcacacagctgacagaccgctggcaaaggatagataaacagatcgactttagattatgggacctggagaaacaaatcaagcaattgaggaattatcgtgataactatcaggctttctgcaagtggctctatgatcgtaaacgccgccaggattccttagaatccatgaaatttggagattccaacacagtcatgcggtttttgaatgagcagaagaacttgcacagtgaaatatctggcaaacgagacaaatcagaggaagtacaaaaaattgctgaactttgcgccaattcaattaaggattatgagctccagctggcctcatacacctcaggactggaaactctgctgaacatacctatcaagaggaccatgattcagtccccttctggggtgattctgcaagaggctgcagatgttcatgctcggtacattgaactacttacaagatctggagactattacaggttcttaagtgagatgctgaagagtttggaagatctgaagctgaaaaataccaagatcgaagttttggaagaggagctcagactggcccgagatgccaactcggaaaactgtaataagaacaaattcctggatcagaacctgcagaaataccaggcagagtgttcccagttcaaagcgaagcttgcgagcctggaggagctgaagagacaggctgagctggatgggaagtcggctaagcaaaatctagacaagtgctacggccaaataaaagaactcaatgagaagatcacccgactgacttatgagattgaagatgaaaagagaagaagaaaatctgtggaagacagatttgaccaacagaagaatgactatgaccaactgcagaaagcaaggcaatgtgaaaaggagaaccttggttggcagaaattagagtctgagaaagccatcaaggagaaggagtacgagattgaaaggttgagggttctactgcaggaagaaggcacccggaagagagaatatgaaaatgagctggcaaaggtaagaaaccactataatgaggagatgagtaatttaaggaacaagtatgaaacagagattaacattacgaagaccaccatcaaggagatatccatgcaaaaagaggatgattccaaaaatcttagaaaccagcttgatagactttcaagggaaaatcgagatctgaaggatgaaattgtcaggctcaatgacagcatcttgcaggccactgagcagcgaaggcgagctgaagaaaacgcccttcagcaaaaggcctgtggctctgagataatgcagaagaagcagcatctggagatagaactgaagcaggtcatgcagcagcgctctgaggacaatgcccggcacaagcagtccctggaggaggctgccaagaccattcaggacaaaaataaggagatcgagagactcaaagctgagtttcaggaggaggccaagcgccgctgggaatatgaaaatgaactgagtaaggtaagaaacaattatgatgaggagatcattagcttaaaaaatcagtttgagaccgagatcaacatcaccaagaccaccatccaccagctcaccatgcagaaggaagaggataccagtggctaccgggctcagatagacaatctcacccgagaaaacaggagcttatctgaagaaataaagaggctgaagaacactctaacccagaccacagagaatctcaggagggtggaagaagacatccaacagcaaaaggccactggctctgaggtgtctcagaggaaacagcagctggaggttgagctgagacaagtcactcagatgcgaacagaggagagcgtaagatataagcaatctcttgatgatgctgccaaaaccatccaggataaaaacaaggagatagaaaggttaaaacaactgatcgacaaagaaacaaatgaccggaaatgcctggaagatgaaaacgcgagattacaaagggtccagtatgacctgcagaaagcaaacagtagtgcgacggagacaataaacaaactgaaggttcaggagcaagaactgacacgcctgaggatcgactatgaaagggtttcccaggagaggactgtgaaggaccaggatatcacgcggttccagaactctctgaaagagctgcagctgcagaagcagaaggtggaagaggagctgaatcggctgaagaggaccgcgtcagaagactcctgcaagaggaagaagctggaggaagagctggaaggcatgaggaggtcgctgaaggagcaagccatcaaaatcaccaacctgacccagcagctggagcaggcatccattgttaagaagaggagtgaggatgacctccggcagcagagggacgtgctggatggccacctgagggaaaagcagaggacccaggaagagctgaggaggctctcttctgaggtcgaggccctgaggcggcagttactccaggaacaggaaagtgtcaaacaagctcacttgaggaatgagcatttccagaaggcgatagaagataaaagcagaagcttaaatgaaagcaaaatagaaattgagaggctgcagtctctcacagagaacctgaccaaggagcacttgatgttagaagaagaactgcggaacctgaggctggagtacgatgacctgaggagaggacgaagcgaagcggacagtgataaaaatgcaaccatcttggaactaaggagccagctgcagatcagcaacaaccggaccctggaactgcaggggctgattaatgatttacagagagagagggaaaatttgagacaggaaattgagaaattccaaaagcaggctttagaggcatctaataggattcaggaatcaaagaatcagtgtactcaggtggtacaggaaagagagagccttctggtgaaaatcaaagtcctggagcaagacaaggcaaggctgcagaggctggaggatgagctgaatcgtgcaaaatcaactctagaggcagaaaccagggtgaaacagcgcctggagtgtgagaaacagcaaattcagaatgacctgaatcagtggaagactcaatattcccgcaaggaggaggctattaggaagatagaatcggaaagagaaaagagtgagagagagaagaacagtcttaggagtgagatcgaaagactccaagcagagatcaagagaattgaagagaggtgcaggcgtaagctggaggattctaccagggagacacagtcacagttagaaacagaacgctcccgatatcagagggagattgataaactcagacagcgcccatatgggtcccatcgagagacccagactgagtgtgagtggaccgttgacacctccaagctggtgtttgatgggctgaggaagaaggtgacagcaatgcagctctatgagtgtcagctgatcgacaaaacaaccttggacaaactattgaaggggaagaagtcagtggaagaagttgcttctgaaatccagccattccttcggggtgcaggatctatcgctggagcatctgcttctcctaaggaaaaatactctttggtagaggccaagagaaagaaattaatcagcccagaatccacagtcatgcttctggaggcccaggcagctacaggtggtataattgatccccatcggaatgagaagctgactgtcgacagtgccatagctcgggacctcattgacttcgatgaccgtcagcagatatatgcagcagaaaaagctatcactggttttgatgatccattttcaggcaagacagtatctgtttcagaagccatcaagaaaaatttgattgatagagaaaccggaatgcgcctgctggaagcccagattgcttcagggggtgtagtagaccctgtgaacagtgtctttttgccaaaagatgtcgccttggcccgggggctgattgatagagatttgtatcgatccctgaatgatccccgagatagtcagaaaaactttgtggatccagtcaccaaaaagaaggtcagttacgtgcagctgaaggaacggtgcagaatcgaaccacatactggtctgctcttgctttcagtacagaagagaagcatgtccttccaaggaatcagacaacctgtgaccgtcactgagctagtagattctggtatattgagaccgtccactgtcaatgaactggaatctggtcagatttcttatgacgaggttggtgagagaattaaggacttcctccagggttcaagctgcatagcaggcatatacaatgagaccacaaaacagaagcttggcatttatgaggccatgaaaattggcttagtccgacctggtactgctctggagttgctggaagcccaagcagctactggctttatagtggatcctgttagcaacttgaggttaccagtggaggaagcctacaagagaggtctggtgggcattgagttcaaagagaagctcctgtctgcagaacgagctgtcactgggtataatgatcctgaaacaggaaacatcatctctttgttccaagccatgaataaggaactcatcgaaaagggccacggtattcgcttattagaagcacagatcgcaaccggggggatcattgacccaaaggagagccatcgtttaccagttgacatagcatataagaggggctatttcaatgaggaactcagtgagattctctcagatccaagtgatgataccaaaggattttttgaccccaacactgaagaaaatcttacctatctgcaactaaaagaaagatgcattaaggatgaggaaacagggctctgtcttctgcctctgaaagaaaagaagaaacaggtgcagacatcacaaaagaataccctcaggaagcgtagagtggtcatagttgacccagaaaccaataaagaaatgtctgttcaggaggcctacaagaagggcctaattgattatgaaaccttcaaagaactgtgtgagcaggaatgtgaatgggaagaaataaccatcacgggatcagatggctccaccagggtggtcctggtagatagaaagacaggcagtcagtatgatattcaagatgctattgacaagggccttgttgacaggaagttctttgatcagtaccgatccggcagcctcagcctcactcaatttgctgacatgatctccttgaaaaatggtgtcggcaccagcagcagcatgggcagtggtgtcagcgatgatgtttttagcagctcccgacatgaatcagtaagtaagatttccaccatatccagcgtcaggaatttaaccataaggagcagctctttttcagacaccctggaagaatcgagccccattgcagccatctttgacacagaaaacctggagaaaatctccattacagaaggtatagagcggggcatcgttgacagcatcacgggtcagaggcttctggaggctcaggcctgcacaggtggcatcatccacccaaccacgggccagaagctgtcacttcaggacgcagtctcccagggtgtgattgaccaagacatggccaccagcgtgaagcctgctcagaaagccttcataggcttcgagggtgtgaagggaaagaagaagatgtcagcagcagaggcagtgaaagaaaaatggctcccgtatgaggctggccagcgcttcctggagttccagtacctcacgggaggtcttgttgacccggaagtgcatgggaggataagcaccgaagaagccatccggaaggggttcatagatggccgcgccgcacagaggctgcaagacaccagcagctatgccaaaatcctgacctgccccaaaaccaaattaaaaatatcctataaggatgccataaatcgctccatggtagaagatatcactgggctgcgccttctggaagccgcctccgtgtcgtccaagggcttacccagcccttacaacatgtcttcggctccggggtcccgctccggctcccgctcgggatctcgctccggatctcgctccgggtcccgcagtgggtcccggagaggaagctttgacgccacagggaattcttcctactcttattcctactcatttagcagtagttctattgggcactagtagtcagttgggagtggttgctataccttgacttcatttatatgaatttccactttattaaataatagaaaagaaaatcccggtgcttgcagtagagtgataggacattctatgcttacagaaaatatagccatgattgaaatcaaatagtaaaggctgttctggctttttatcttcttagctcatcttaaataagcagtacacttggatgcagtgcgtctgaagtgctaatcagttgtaacaatagcacaaatcgaacttaggatttgtttcttctcttctgtgtttcgatttttgatcaattctttaattttggaagcctataatacagttttctattcttggagataaaaattaaatggatcactgatattttagtcattctgcttctcatctaaatatttccatattctgtattaggagaaaattaccctcccagcaccagcccccctctcaaacccccaacccaaaaccaagcattttggaatgagtctcctttagtttcagagtgtggattgtataacccatatactcttcgatgtacttgtttggtttggtattaatttgactgtgcatgacagcggcaatcttttctttggtcaaagttttctgtttattttgcttgtcatattcgatgtactttaaggtgtctttatgaagtttgctattctggcaataaacttttagactttt

SEQ ID NO: 102 - protein, 780 aa, Homo sapiens
MAAPGGRSEPPQLPEYSCSYMVSRPVYSELAFQQQHERRLQERKTLRESLAKCCSCSRKRAFGVLKTLVPILEWLPKYRVKEWLLSDVISGVSTGLVATLQGMAYALLAAVPVGYGLYSAFFPILTYFIFGTSRHISVGPFPVVSLMVGSVVLSMAPDEHFLVSSSNGTVLNTTMIDTAARDTARVLIASALTLLVGIIQLIFGGLQIGFIVRYLADPLVGGFTTAAAFQVLVSQLKIVLNVSTKNYNGVLSIIYTLVEIFQNIGDTNLADFTAGLLTIVVCMAVKELNDRFRHKIPVPIPIEVIVTIIATAISYGANLEKNYNAGIVKSIPRGFLPPELPPVSLFSEMLAASFSIAVVAYAIAVSVGKVYATKYDYTIDGNQEFIAFGISNIFSGFFSCFVATTALSRTAVQESTGGKTQVAGIISAAIVMIAILALGKLLEPLQKSVLAAVVIANLKGMFMQLCDIPRLWRQNKIDAVIWVFTCIVSIILGLDLGLLAGLIFGLLTVVLRVQFPSWNGLGSIPSTDIYKSTKNYKNIEEPQGVKILRFSSPIFYGNVDGFKKCIKSTVGFDAIRVYNKRLKALRKIQKLIKSGQLRATKNGIISDAVSTNNAFEPDEDIEDLEELDIPTKEIEIQVDWNSELPVKVNVPKVPIHSLVLDCGAISFLDVVGVRSLRVIVKEFQRIDVNVYFASLQDYVIEKLEQCGFFDDNIRKDTFFLTVHDAILYLQNQVKSQEGQGSILETITLIQDCKDTLELIETELTEEELDVQDEAMRTLAS

SEQ ID NO: 103 - DNA, 4930 bp, Homo sapiens
ctcagccttcccggttcgggaaaggggaagaatgcaggaggggtaggatttctttcctgataggatcggttgggaaagaccgcagcctgtgtgtgtctttcccttcgaccaaggtgtctgttgctccgtaaataaaacgtcccactgccttctgagagcgctataaaggcagcggaagggtagtccgcggggcattccgggcggggcgcgagcagagacaggtcatggcagcgccaggcggcaggtcggagccgccgcagctccccgagtacagctgcagctacatggtgtcgcggccggtctacagcgagctcgctttccagcaacagcacgagcggcgcctgcaggagcgcaagacgctgcgggagagcctggccaagtgctgcagttgttcaagaaagagagcctttggtgtgctaaagactcttgtgcccatcttggagtggctccccaaataccgagtcaaggaatggctgcttagtgacgtcatttcgggagttagtactgggctagtggccacgctgcaagggatggcatatgccctactagctgcagttcctgtcggatatggtctctactctgcttttttccctatcctgacatactttatctttggaacatcaagacatatctcagttggaccttttccagtggtgagtttaatggtgggatctgttgttctgagcatggcccccgacgaacactttctcgtatccagcagcaatggaactgtattaaatactactatgatagacactgcagctagagatacagctagagtcctgattgccagtgccctgactctgctggttggaattatacagttgatatttggtggcttgcagattggattcatagtgaggtacttggcagatcctttggttggtggcttcacaacagctgctgccttccaagtgctggtctcacagctaaagattgtcctcaatgtttcaaccaaaaactacaatggagttctctctattatctatacgctggttgagatttttcaaaatattggtgataccaatcttgctgatttcactgctggattgctcaccattgtcgtctgtatggcagttaaggaattaaatgatcggtttagacacaaaatcccagtccctattcctatagaagtaattgtgacgataattgctactgccatttcatatggagccaacctggaaaaaaattacaatgctggcattgttaaatccatcccaagggggtttttgcctcctgaacttccacctgtgagcttgttctcggagatgctggctgcatcattttccatcgctgtggtggcttatgctattgcagtgtcagtaggaaaagtatatgccaccaagtatgattacaccatcgatgggaaccaggaattcattgcctttgggatcagcaacatcttctcaggattcttctcttgttttgtggccaccactgctctttcccgcacggccgtccaggagagcactggaggaaagacacaggttgctggcatcatctctgctgcgattgtgatgatcgccattcttgccctggggaagcttctggaacccttgcagaagtcggtcttggcagctgttgtaattgccaacctgaaagggatgtttatgcagctgtgtgacattcctcgtctgtggagacagaataagattgatgctgttatctgggtgtttacgtgtatagtgtccatcattctggggctggatctcggtttactagctggccttatatttggactgttgactgtggtcctgagagttcagtttccttcttggaatggccttggaagcatccctagcacagatatctacaaaagtaccaagaattacaaaaacattgaagaacctcaaggagtgaagattcttagattttccagtcctattttctatggcaatgtcgatggttttaaaaaatgtatcaagtccacagttggatttgatgccattagagtatataataagaggctgaaagcgctgaggaaaatacagaaactaataaaaagtggacaattaagagcaacaaagaatggcatcataagtgatgctgtttcaacaaataatgcttttgagcctgatgaggatattgaagatctggaggaacttgatatcccaaccaaggaaatagagattcaagtggattggaactctgagcttccagtcaaagtgaacgttcccaaagtgccaatccatagccttgtgcttgactgtggagctatatctttcctggacgttgttggagtgagatcactgcgggtgattgtcaaagaattccaaagaattgatgtgaatgtgtattttgcatcacttcaagattatgtgatagaaaagctggagcaatgcgggttctttgacgacaacattagaaaggacacattctttttgacggtccatgatgctatactctatctacagaaccaagtgaaatctcaagagggtcaaggttccattttagaaacgatcactctcattcaggattgtaaagatacccttgaattaatagaaacagagctgacggaagaagaacttgatgtccaggatgaggctatgcgtacacttgcatcctgaaagtgggttcgggaggtctctatgagcaaggaatacaagacaaaacttcctcaatgcattgactatttcttcagactcaaaacactcattcttttttctattaagccattgaaagagaagcactaagactgcttctaggctttatttataaaataaacaccttatccctaacatgggcaaaatggctagaattattcagacgatttggcagcgtccagggtaagctggtgttataatacgctgctgatctacatcacagatttgctaataatgttcacgtgggccctggcatatctctgttcagttagagtgagtgctgacccaacagcctctgtggtcaagcgagtcacgaatgattaatcataaagaaaaatcagtttttgactgacctggatatccatgagctgcactgatcaccatgtaaggtcacatttagtaaatgctgaaataaaatgattaatgcatttatcaataaaagcctttgaaaatactttggataataaattggagttttaaaaatgcaaatttgcttagtatctaataatgaagtgttattacatatagccggaattgaggatctctttgatcctggaaatggtttacctaaaagctacagaaccaggccaatatattttgaaatattgatgcagacaaatgaaataataaagagattttcatggtttataaaaatcttttttgatatgataataatcatgatcacaactgagatcaaaaaaatatatgacagattattttgtttaaaaatgcagttttaattatcttagtctatagaaatgatcattgcatggaggcatgtataggtatgatctgtgtaaaatctgacataaaaacagtgctattctgagtgaaaatttttttgatgtgcttacataaccatggtgattaaaatgagtttatattttttctcaaaaattttagcagtgtgtaaagtaagtaatctttaactgaactctgaccacttaaaaaaaaatctaaaaattgaactacctatagtagtctgtgtttaaagtgaatttttaaagacaaagcattctaaatgaactcaatataaaaacattcatttggaatgtacatactgaaaaatacaggtttttttgaccaaaagtttttatatcttttctttttatttatttttttcctaagtgccaacaattttctagatattatatacaacacaggctttgatcttggggacttttcccatatatttcacactggagtgaatgaagttgtacttcatttctagagaaaagttatacccaggtccccaattgagaatgtcttgcttgattgaaaacgacatcatcccttggtatactccagggattggtttcaggacccctgcatttaccaaaatttgtgcacactcaagtcctgcagtcacccctgcctaaagatagaatggcttctctgtttttcttctgaaatacaaccagaaacaatgtgtctatttctgaaagaataggattaatgatcatacaaatgggttaatcctgaattctggttgtaaatctggttacagcataactaggattataatgctgcctcattttcacagcactacttgcttatattgacaacaaatcatctcgctaaagagtgaatgtaggccaggcgcggtggctcatgcctgtaatcccagcactttgggaggccgaggcgggtggatcacgaggtcaggagatcgagaccatcctggctaacatggtaaaaccccgtctctactaaaaatagaaaaaaagaaattagcctagcgtggtggctggcgggcgcctgtagtcccagctatttgggaggctaaggcaggagaatggcgtgaacccgggaggcggagcttgcagtgagccgaggtcgtgccactgcactccagcctgggcgacagagcaagactccgtctcaaaaaaaaaaaaaaaaaaaaaaaaagagtgaatgtaatagtcttgcagaaaatgaatgaatacctttgttcaataaaggaaatatgcactgctcacttttttgaaggaaatgccaaagttacgttttacaacaaggctagagtttgtaaattctgggttcatttgtgatgacataagtcagcaaactgcgggaatactgtctcttctatgtattttgtgaatagtaagcataattttagttttgtattatcaatgaaaatttcacttgaaattaaagctgccttttgttatatttttaacctataggataagattccagtattgtatatgagttttaacaaattaaaaaatcaaatcatgtacatttgaaaatatttgcacacatttaaaaataaatgtaaagttgtcttttaaactactcggatgtgtcctttctgaacaaaa

SEQ ID NO: 104 - protein, 3460 aa, Homo sapiens
MERSGWARQTFLLALLLGATLRARAAAGYYPRFSPFFFLCTHHGELEGDGEQGEVLISLHIAGNPTYYVPGQEYHVTISTSTFFDGLLVTGLYTSTSVQASQSIGGSSAFGFGIMSDHQFGNQFMCSVVASHVSHLPTTNLSFIWIAPPAGTGCVNFMATATHRGQVIFKDALAQQLCEQGAPTDVTVHPHLAEIHSDSIILRDDFDSYHQLQLNPNIWVECNNCETGEQCGAIMHGNAVTFCEPYGPRELITTGLNTTTASVLQFSIGSGSCRFSYSDPSIIVLYAKNNSADWIQLEKIRAPSNVSTIIHILYLPEDAKGENVQFQWKQENLRVGEVYEACWALDNILIINSAHRQVVLEDSLDPVDTGNWLFFPGATVKHSCQSDGNSIYFHGNEGSEFNFATTRDVDLSTEDIQEQWSEEFESQPTGWDVLGAVIGTECGTIESGLSMVFLKDGERKLCTPSMDTTGYGNLRFYFVMGGICDPGNSHENDIILYAKIEGRKEHITLDTLSYSSYKVPSLVSVVINPELQTPATKFCLRQKNHQGHNRNVWAVDFFHVLPVLPSTMSHMIQFSINLGCGTHQPGNSVSLEFSTNHGRSWSLLHTECLPEICAGPHLPHSTVYSSENYSGWNRITIPLPNAALTRNTRIRWRQTGPILGNMWAIDNVYIGPSCLKFCSGRGQCTRHGCKCDPGFSGPACEMASQTFPMFISESFGSSRLSSYHNFYSIRGAEVSFGCGVLASGKALVFNKDGRRQLITSFLDSSQSRFLQFTLRLGSKSVLSTCRAPDQPGEGVLLHYSYDNGITWKLLEHYSYLSYHEPRIISVELPGDAKQFGIQFRWWQPYHSSQREDVWAIDEIIMTSVLFNSISLDFTNLVEVTQSLGFYLGNVQPYCGHDWTLCFTGDSKLASSMRYVETQSMQIGASYMIQFSLVMGCGQKYTPHMDNQVKLEYSTNHGLTWHLVQEECLPSMPSCQEFTSASIYHASEFTQWRRVIVLLPQKTWSSATRFRWSQSYYTAQDEWALDSIYIGQQCPNMCSGHGSCDHGICRCDQGYQGTECHPEAALPSTIMSDFENQNGWESDWQEVIGGEIVKPEQGCGVISSGSSLYFSKAGKRQLVSWDLDTSWVDFVQFYIQIGGESASCNKPDSREEGVLLQYSNNGGIQWHLLAEMYFSDFSKPRFVYLELPAAAKTPCTRFRWWQPVFSGEDYDQWAVDDIIILSEKQKQIIPVINPTLPQNFYEKPAFDYPMNQMSVWLMLANEGMVKNETFCAATPSAMIFGKSDGDRFAVTRDLTLKPGYVLQFKLNIGCANQFSSTAPVLLQYSHDAGMSWFLVKEGCYPASAGKGCEGNSRELSEPTMYHTGDFEEWTRITIVIPRSLASSKTRFRWIQESSSQKNVPPFGLDGVYISEPCPSYCSGHGDCISGVCFCDLGYTAAQGTCVSNVPNHNEMFDRFEGKLSPLWYKITGAQVGTGCGTLNDGKSLYFNGPGKREARTVPLDTRNIRLVQFYIQIGSKTSGITCIKPRTRNEGLIVQYSNDNGILWHLLRELDFMSFLEPQIISIDLPQDAKTPATAFRWWQPQHGKHSAQWALDDVLIGMNDSSQTGFQDKFDGSIDLQANWYRIQGGQVDIDCLSMDTALIFTENIGKPRYAETWDFHVSASTFLQFEMSMGCSKPFSNSHSVQLQYSLNNGKDWHLVTEECVPPTIGCLHYTESSIYTSERFQNWKRITVYLPLSTISPRTRFRWIQANYTVGADSWAIDNVVLASGCPWMCSGRGICDAGRCVCDRGFGGPYCVPVVPLPSILKDDFNGNLHPDLWPEVYGAERGNLNGETIKSGTSLIFKGEGLRMLISRDLDCTNTMYVQFSLRFIAKSTPERSHSILLQFSISGGITWHLMDEFYFPQTTNILFINVPLPYTAQTNATRFRLWQPYNNGKKEEIWIVDDFIIDGNNVNNPVMLLDTFDFGPREDNWFFYPGGNIGLYCPYSSKGAPEEDSAMVFVSNEVGEHSITTRDLNVNENTIIQFEINVGCSTDSSSADPVRLEFSRDFGATWHLLLPLCYHSSSHVSSLCSTEHHPSSTYYAGTMQGWRREVVHFGKLHLCGSVRFRWYQGFYPAGSQPVTWAIDNVYIGPQCEEMCNGQGSCINGTKCICDPGYSGPTCKISTKNPDFLKDDFEGQLESDRFLLMSGGKPSRKCGILSSGNNLFFNEDGLRMLMTRDLDLSHARFVQFFMRLGCGKGVPDPRSQPVLLQYSLNGGLSWSLLQEFLFSNSSNVGRYIALEIPLKARSGSTRLRWWQPSENGHFYSPWVIDQILIGGNISGNTVLEDDFTTLDSRKWLLHPGGTKMPVCGSTGDALVFIEKASTRYVVSTDVAVNEDSFLQIDFAASCSVTDSCYAIELEYSVDLGLSWHPLVRDCLPTNVECSRYHLQRILVSDTFNKWTRITLPLPPYTRSQATRFRWHQPAPFDKQQTWAIDNVYIGDGCIDMCSGHGRCIQGNCVCDEQWGGLYCDDPETSLPTQLKDNFNRAPSSQNWLTVNGGKLSTVCGAVASGMALHFSGGCSRLLVTVDLNLTNAEFIQFYFMYGCLITPNNRNQGVLLEYSVNGGITWNLLMEIFYDQYSKPGFVNILLPPDAKEIATRFRWWQPRHDGLDQNDWAIDNVLISGSADQRTVMLDTFSSAPVPQHERSPADAGPVGRIAFDMFMEDKTSVNEHWLFHDDCTVERFCDSPDGVMLCGSHDGREVYAVTHDLTPTEGWIMQFKISVGCKVSEKIAQNQIHVQYSTDFGVSWNYLVPQCLPADPKCSGSVSQPSVFFPTKGWKRITYPLPESLVGNPVRFRFYQKYSDMQWAIDNFYLGPGCLDNCRGHGDCLREQCICDPGYSGPNCYLTHTLKTFLKERFDSEEIKPDLWMSLEGGSTCTECGILAEDTALYFGGSTVRQAVTQDLDLRGAKFLQYWGRIGSENNMTSCHRPICRKEGVLLDYSTDGGITWTLLHEMDYQKYISVRHDYILLPEDALTNTTRLRWWQPFVISNGIVVSGVERAQWALDNILIGGAEINPSQLVDTFDDEGTSHEENWSFYPNAVRTAGFCGNPSFHLYWPNKKKDKTHNALSSRELIIQPGYMMQFKIVVGCEATSCGDLHSVMLEYTKDARSDSWQLVQTQCLPSSSNSIGCSPFQFHEATIYNSVNSSSWKRITIQLPDHVSSSATQFRWIQKGEETEKQSWAIDHVYIGEACPKLCSGHGYCTTGAICICDESFQGDDCSVFSHDLPSYIKDNFESARVTEANWETIQGGVIGSGCGQLAPYAHGDSLYFNGCQIRQAATKPLDLTRASKIMFVLQIGSMSQTDSCNSDLSGPHAVDKAVLLQYSVNNGITWHVIAQHQPKDFTQAQRVSYNVPLEARMKGVLLRWWQPRHNGTGHDQWALDHVEVVLVSTRKQNYMMNFSRQHGLRHFYNRRRRSLRRYP

SEQ ID NO: 105 - DNA, 11564 bp, Homo sapiens
tcggcgggggcccgctcccaggcccgctcccgagcccgttccgctcccgtccgccttcttctcgccttctctccgcgtggctcctccgtcccggcgtctccaaaactgaatgagcgagcggcgcgtagggcgcgcggcggcggcggcggcggcggcggcatggagcgcagtggctgggcccggcagactttcctcctagcgctgttgctgggggcgacgctgagggcgcgcgcggcggctggctattacccccgcttttcgcccttctttttcctgtgcacccaccacggggagctggaaggggatggggagcagggcgaggtgctcatttccctgcatattgcgggcaaccccacctactacgttccgggacaagaataccatgtgacaatttcaacaagcaccttttttgacggcttgctggtgacaggactatacacatctacaagtgttcaggcatcacagagcattggaggttccagtgctttcggatttgggatcatgtctgaccaccagtttggtaaccagtttatgtgcagtgtggtagcctctcacgtgagtcacctgcccacaaccaacctcagtttcatctggattgctccacctgcgggcacaggctgtgtgaatttcatggctacagcaacacaccggggccaggttattttcaaagatgctttagcccagcagttgtgtgaacaaggagctccaacagatgtcactgtgcacccacatctagctgaaatacatagtgacagcattatcctgagagatgactttgactcctaccaccaactgcaattaaatccaaatatatgggttgaatgtaacaactgtgagactggagaacagtgtggcgcgattatgcatggcaatgccgtcaccttctgtgaaccatatggcccacgagaactgattaccacaggccttaatacaacaacagcttctgtcctccaattttccattgggtcaggttcatgtcgctttagttattcagaccccagcatcatcgtgttatatgccaagaataactctgcggactggattcagctagagaaaattagagccccttccaatgtcagcacaatcatccatatcctctaccttcctgaggacgccaaaggggagaatgtccaatttcagtggaagcaggaaaatcttcgtgtaggtgaagtgtatgaagcctgctgggccttagataacatcttgatcatcaattcagctcacagacaagtcgttttagaagatagtctcgacccagtggacacaggcaactggcttttcttcccaggagctacagttaagcatagctgtcagtcagatgggaactccatttatttccatggaaatgaaggcagcgagttcaattttgccaccaccagggatgtagatctttccacagaagatattcaagagcaatggtcagaagaatttgagagccagcctacaggatgggatgtcttgggagctgtcattggtacagaatgtggaacgatagaatcaggcttatcaatggtcttcctcaaagatggagagaggaaattatgcactccatccatggacactaccggttatgggaacctgaggttttactttgtgatgggaggaatttgtgaccctggaaattctcatgaaaatgacataatcctgtatgcaaaaattgaaggaagaaaagagcatataacactggataccctttcctattcctcatataaggttccgtctttggtttctgtggtcatcaatcctgaacttcagactcctgctaccaaattttgtctcaggcaaaagaaccatcaaggacataataggaatgtctgggctgtagactttttccatgtcttgcctgttctcccttctacaatgtctcacatgatacagttttccatcaatctgggatgtggaacgcatcagcctggtaacagtgtcagcttggaattttctaccaaccatgggcgctcctggtccctccttcacactgaatgcttacctgagatctgtgctggaccccacctcccccacagcactgtctactcctctgaaaactacagtgggtggaaccgaataacaattccccttcctaacgcagcactaacccggaacaccaggattcgctggagacaaacaggaccaatccttggaaacatgtgggcaattgataatgtttatattggcccgtcatgtctcaaattctgttctggcagaggacagtgcactagacatggttgcaagtgtgaccctggattttctggcccagcttgtgagatggcatcccagacattcccaatgtttatttctgaaagctttggcagttccaggctctcctcttaccataacttttactctatccgtggtgctgaagtcagctttggttgtggtgtcttggccagtggtaaggccctggttttcaacaaagatgggcggcgtcagctaattacatctttccttgacagctcacaatccaggtttctccagttcacactgagactggggagcaaatctgttctgagcacgtgcagagcccctgatcagcctggtgaaggagttttgttgcattattcttatgataatgggataacttggaaactcctggagcattattcatatctcagctatcatgagcccagaataatctccgtagaactaccaggtgatgcaaagcagtttggaattcagttcagatggtggcaaccgtatcattcttcccagagagaagatgtatgggctattgatgagattatcatgacatctgtgcttttcaacagcattagtcttgactttaccaatcttgtggaggtcactcagtctctgggattctaccttggaaatgttcagccatactgtggccacgactggaccctttgttttacaggagattctaaacttgcctcaagtatgcgctatgtggaaacacaatcaatgcagataggagcatcctatatgattcagttcagtttggtgatgggatgtggccagaaatacaccccacacatggacaaccaggtgaagctggagtactcaaccaaccacggccttacctggcacctcgtccaagaagaatgccttccaagtatgccaagttgtcaggaatttacatcagcaagtatttaccatgccagtgagtttacacagtggaggagagtcatagtgcttcttccccagaaaacttggtccagtgctacccgtttccgctggagccagagctattacacagctcaagacgagtgggctttggacagcatttacattgggcagcagtgccccaacatgtgcagtgggcatggctcatgcgatcatggcatatgcaggtgtgaccaggggtaccaaggcactgaatgccacccagaagctgcccttccgtccacaattatgtcagattttgagaaccagaatggctgggagtctgactggcaagaagttattgggggagaaattgtaaaaccagaacaagggtgtggtgtcatctcttctggatcatctctgtacttcagcaaggctgggaaaagacagctggtgagttgggacctggatacttcttgggtggactttgtccagttctacatccagataggcggagagagtgcttcatgcaacaagcctgacagcagagaggagggcgtcctccttcagtacagcaacaatgggggcatccagtggcacctgctagcagagatgtacttttcagacttcagcaaacccagatttgtctatctggagcttccagctgctgccaagaccccttgcaccaggttccgctggtggcagcccgtgttctcaggggaggactatgaccagtgggcagtcgatgacatcatcattctgtccgagaagcagaagcagatcatcccagttatcaatccaactttacctcagaacttttatgagaagccagcttttgattaccctatgaatcagatgagtgtgtggttgatgttggctaatgaaggaatggttaaaaatgaaaccttctgtgctgccacaccatcagcaatgatatttggaaaatcagatggagatcgatttgcagtaactcgagatttgaccctgaaacctggatatgtgctacagttcaagctaaacataggttgtgccaatcaattcagcagtactgctccagttcttcttcagtactctcatgatgctggtatgtcctggtttctggtgaaagaaggctgttacccggcttctgcaggcaaaggatgcgaaggaaactccagagaactaagtgagcccaccatgtatcacacaggggactttgaagaatggacaagaatcaccattgttattccaaggtctcttgcatccagcaagaccagattccgatggatccaggagagcagctcacagaaaaacgtgcctccatttggtttagatggagtgtacatatccgagccttgtcccagttactgcagtggccatggggactgcatttcaggagtgtgtttctgtgacctgggatatactgctgcacaaggaacctgtgtgtcaaatgtccccaatcacaatgagatgttcgataggtttgaggggaagctcagccctctgtggtacaagataacaggtgcccaggttggaactggctgtggaacacttaacgatggcaaatctctctacttcaatggccctgggaaaagggaagcccggacggtccctctggacaccaggaatatcagacttgttcaattttatatacaaattggaagcaaaacttcaggcattacctgcatcaaaccaagaactagaaatgaagggcttattgttcagtattcaaatgacaatgggatactctggcatttgcttcgagagttggacttcatgtccttcctggaaccacagatcatttccattgacctgccacaggacgcgaagacacctgcaacggcatttcgatggtggcaaccgcaacatgggaagcattcagcccagtgggctttggatgatgttcttataggaatgaatgacagctctcaaactggatttcaagacaaatttgatggctctatagatttgcaagccaactggtatcgaatccaaggaggtcaagttgatattgactgtctctctatggatactgctctgatattcactgaaaacataggaaaacctcgttatgctgagacctgggattttcatgtgtcagcatctacctttttgcagtttgaaatgagcatgggctgtagcaagcccttcagcaactcccacagtgtacagctccagtattctctgaacaatggcaaggactggcatcttgtcaccgaagagtgtgttcctccaaccattggctgtctgcattacacggaaagttcaatttacacctcggaaagattccagaattggaagcggatcactgtctaccttccactctccaccatttctcccaggacccggttcagatggattcaggccaactacactgtgggggctgattcctgggcgattgataatgttgtactggcctcagggtgcccttggatgtgctcaggacgagggatttgtgatgctggacgctgtgtgtgtgaccggggctttggtggaccctattgtgttcctgttgttcctctgccctcgattcttaaagacgatttcaatgggaatttacatcctgacctttggcctgaagtgtatggtgcagagagggggaatctgaatggtgaaaccatcaaatctggaacatctctaatttttaaaggggaaggactaaggatgcttatttcaagagatctagattgtacaaatacaatgtatgtccagttttcacttagatttatagcaaaaagtaccccagagagatctcactctattctgttacaattctccatcagtggaggaatcacttggcacctgatggatgaattttactttcctcaaacaacgaatatacttttcatcaatgttcccttgccatacactgcccaaaccaatgctacaagattcagactctggcaaccttataataacggtaagaaagaagaaatctggattgttgatgacttcattatcgatggaaataatgtaaacaaccctgtgatgctcttggatacatttgattttgggcccagagaagacaattggtttttctatcctggtggtaacatcggtctttattgtccatattcttcaaagggggcacctgaagaagattcagctatggtgtttgtttcaaatgaagttggtgagcattccattaccacccgtgacctaaatgtgaatgagaacaccatcatacaatttgagatcaacgttggctgttcgactgatagctcatccgcggatccagtgagactggaattttcaagggacttcggggcgacctggcaccttctgctgcccctctgctaccacagcagcagccacgtcagctctttatgctccaccgagcaccaccccagcagcacctactacgcaggaaccatgcagggctggaggagggaggtcgtgcactttgggaagctgcacctttgtggatctgtccgtttcagatggtaccagggattttaccctgccggctctcagccagtgacatgggccattgataatgtctacatcggtccccagtgtgaggagatgtgtaatggacaggggagctgtatcaatggaaccaaatgtatatgtgaccctggctactcaggtccaacctgtaaaataagcaccaaaaatcctgattttctcaaagatgatttcgaaggtcagctagaatctgatagattcttattaatgagtggtgggaaaccatctcgaaagtgtggaatcctttctagtggaaacaacctctttttcaatgaagatggcttgcgcatgttgatgacacgagacctggatttatcacatgctagatttgtgcagttcttcatgagactgggatgtggtaaaggcgttcctgaccccaggagtcaacccgtgctcctacagtattctctcaacggtggcctctcgtggagtcttcttcaggagttccttttcagcaattccagcaatgtgggcaggtacattgccctggagatacccttgaaagcccgttctggttctactcgccttcgctggtggcaaccgtctgagaatgggcacttctacagcccctgggttatcgatcagattcttattggaggaaatatttctggtaatacggtcttggaagatgatttcacaacccttgatagtaggaaatggctgcttcacccaggaggcaccaagatgcccgtgtgtggctctactggtgatgccctggtcttcattgaaaaggccagcacccgttacgtggtcagcacagacgttgccgtgaatgaggattccttcctacagatagacttcgctgcctcctgctcagtcacagactcttgttatgcgattgaattggaatactcagtagatcttggattgtcatggcacccattggtaagggactgtctgcctaccaatgtggaatgcagtcgctatcatctgcaacggatcctggtgtcagacactttcaacaagtggactagaatcactctgcctctccctccttataccaggtcccaagccactcgtttccgttggcatcaaccagctccttttgacaagcagcagacatgggcaatagataatgtctatatcggggatggctgcatagacatgtgcagtggccatgggagatgcatccagggaaactgcgtctgtgatgaacagtggggtggcctgtactgtgatgaccccgagacctctcttccaacccaactcaaagacaacttcaatcgagctccatccagtcagaactggctgactgtgaacggagggaaattgagtacagtgtgtggagccgtggcgtcgggaatggctctccatttcagtgggggttgtagtcgattattagtcactgtggatctaaacctcactaatgctgagttcatccaattttacttcatgtatgggtgcctgattacaccaaacaaccgtaaccaaggtgttctcttggaatattctgtcaatggaggcattacctggaacctgctcatggagattttctatgaccagtacagtaagcccgggtttgtgaatatccttctccctcctgatgctaaagagattgccactcgcttccgctggtggcagccaagacatgacggcctggatcagaacgactgggccattgacaatgtcctcatctcaggctctgctgaccaaaggaccgttatgctggacaccttcagcagcgccccagtaccccagcatgagcgctcccctgcagatgccggccctgtcgggaggatcgcctttgacatgtttatggaagacaaaacttcagtgaatgagcactggctattccatgatgattgtacagtagaaagattctgtgactcccctgatggtgtgatgctctgtggcagtcatgatggacgggaggtgtatgcagtgacccatgacctgactcccactgaaggctggattatgcaattcaagatctcagttggatgtaaggtgtctgaaaaaattgcccagaatcaaattcatgtgcagtattctactgacttcggtgtgagttggaattatctggtccctcagtgcttgcctgctgacccaaaatgctctggaagtgtttctcagccatctgtattctttccaactaaagggtggaaaaggatcacctacccacttcctgaaagcttagtgggaaatccggtaaggtttaggttctatcagaagtactcagacatgcagtgggcaatcgataatttctacctgggccctggatgcttggacaactgcaggggccatggagattgcttaagggaacagtgcatctgtgatccgggatactcagggccaaactgctacttgacccacactctgaagactttcctgaaggaacgctttgacagtgaagaaatcaaacctgacttatggatgtccttagaaggtggaagtacttgcactgagtgtggaattcttgccgaggacactgcactctattttgggggatccactgtgagacaagcggttacacaagatttggatcttcgaggtgcaaagttcctgcaatactgggggcgcatcggtagtgagaacaacatgacctcttgccatcgtcccatctgccggaaggaaggcgtgctgttggactactctaccgatggaggaattacctggactttgctccatgagatggattaccagaaatacatttctgttagacacgactacatacttcttcctgaagatgccctcaccaacacaactcgacttcgctggtggcagccttttgtgatcagcaatggaattgtggtctctggggtggagcgtgctcagtgggcactggacaacattttgattggtggagcagaaatcaatcccagccaattggtggacacttttgatgatgaaggcacttcccatgaagaaaactggagtttttaccctaatgctgtaaggacagcaggattttgtggcaatccatcctttcacctctattggccaaataaaaagaaggacaagactcacaatgctctctcctcccgagaactcattatacagccaggatacatgatgcagtttaaaattgtggtgggttgtgaagccacttcttgtggtgaccttcattccgtaatgctggaatacactaaggatgcaagatcggattcctggcagctcgtacagacccagtgccttccttcctcttctaacagcattggctgctcccctttccagttccatgaagccaccatctacaactctgtcaacagctcaagctggaaaagaatcaccatccagctgcctgaccatgtctcctctagtgcaacacagttccgctggatccagaagggagaagaaactgagaagcaaagctgggcaattgaccacgtgtacattggagaggcttgccccaagctctgcagcgggcacggatactgcacgaccggtgccatctgcatctgcgacgagagcttccaaggtgatgactgctctgttttcagtcacgaccttcccagttatattaaagataattttgagtccgcaagagtcaccgaggcaaactgggagaccattcaaggtggagtcataggaagtggctgtgggcagctggccccctacgcccatggagactcactgtactttaatggctgtcagatcaggcaagcagctaccaagcctctggatctcactcgagcaagcaaaatcatgtttgttttgcaaattgggagcatgtcgcagacggacagctgcaacagtgacctgagtggcccccacgctgtggacaaggcagtgctgctgcaatacagcgtcaacaacgggatcacctggcatgtcatcgcccagcaccagccaaaggacttcacacaagctcagagagtgtcttacaatgtccccctggaggcacggatgaaaggagtcttactgcgctggtggcaaccacgccacaatggaacaggtcatgatcaatgggctttggaccatgtggaggtcgtcctagtaagcactcgcaaacaaaattacatgatgaatttttcacgacaacatgggctcagacatttctacaacagaagacgaaggtcacttaggcgatacccatgaagaatcaaaaagtttattttttttcttccaacatgtgatgtgttgctctccattcttttaaatctcgcactacatctgatatcaggaaatatctgtgaaggacttggtgattacctgaaagcccttctcaagaccgagtgtacaccactttcccacactgtgaactaatgacaagtgacttatttgctcataagtaaatgtcttcatgttgatgtgtccgtgaaagttgtgatctgttgtaatatcagttacagtggcagtattgacaataagaaacagtttaacagaaaaatgaaatttaagcacaaaaaatttaagagattttatgtttaaaatggcatttagcacagtatttaacattcttggtcacaaagctatttaagtggactgtatttcggctatgtctcatgttttatatgattaaattatcattgtttgtcctttatgtattctcttctacaatacaacacattgaaactgtatttacttgttatgttgtaatattttgctgctgaatttggggctacttatattctgcagaaaattaattgaaatacctattcaagaagatagttgtaaagatattgtatctcctttaatatactccttaaaaatgtatgttggtttagcgttgttttgtggataagaaaaatgcttgaccctgaaatattttctactttaaattgtggatgaagaccctatctcccacaaataagttcccatttccttgtctaaagatctttttttaagtgttctgtggctgatttactaacagtaactgccattttttgtctgtgataacagagtgatttgtaaaacagtggttgttttttcattgtgttttcttcgtggattgttttttctgcgggtcatattcataccttctgatgaagttgtacaacaccagcaacattataatggccctgtagctctgaatgctatttgtgtaactgaaaggttgcactctagggtgaaccaagctataaaagcccatgcttaaataaaaattatgtccaaaagcc

SEQ ID NO: 106 - DNA, 3453 bp, Homo sapiens
ttcaatgttgatgtgaaaaactcaatgactttcagcggcccggtggaagacatgtttggatatactgttcaacaatatgaaaatgaagaaggaaaatgggtgcttattggttctccgttagttggccaacccaaaaacagaactggagatgtctataagtgtccagttgggagaggtgaatcattaccttgcgtaaagttggatctaccagttaatacatcaattcccaatgtcacagaagtaaaggagaacatgacatttggatcaactttagtcaccaacccaaatggaggatttctggcttgtgggcccttatatgcctatagatgtggacatttgcattacacaactggaatctgttctgacgtcagccccacatttcaagtcgtgaattccattgcccctgtacaagaatgcagcactcaactggacatagtcatagtgctggatggttccaacagtatttacccatgggacagtgttacagcttttttaaatgacctcttgaaaagaatggatattggtcctaaacagacacaggttggaattgtacagtatggagaaaacgtgacccatgagttcaacctcaataagtattcttccaccgaagaggtacttgttgcagcaaagaaaatagtccagagaggtggccgccagactatgacagctcttggaacagacacagcaagaaaggaggcattcacggaagcccggggtgcccgaagaggagttaaaaaagtcatggttattgtgacagatggagagtctcatgacaatcatcgactgaagaaggtcatccaagactgtgaagatgaaaacattcaacggttttccatagctattcttggcagctataaccgaggaaatttaagcactgaaaaatttgtggaggaaataaaatcaattgcaagtgaacccactgaaaagcatttcttcaatgtctctgatgaattggctctagtcaccattgttaaaactctgggagaaagaatatttgccctggaagccacagctgaccagtcagcagcttcatttgaaatggaaatgtctcagactggcttcagtgctcattattcacaggactgggtcatgcttggagcagtaggagcctatgattggaatggaacagttgtcatgcagaaggctagtcaaatcataatccctcgaaacacaacctttaatgttgagtctaccaaaaagaatgaaccgcttgcttcttatttaggttacactgtaaactctgctactgcttcttctggagatgtgctctatattgctggacagcctcggtacaatcatacaggccaggtcattatctacaggatggaagatggaaacatcaaaattctccagacgctcagtggagaacagattggttcctactttggcagtattttaacaacaactgacattgacaaggattctaatactgacattcttctagtcggagcccctatgtacatgggaacagagaaggaggagcaaggaaaagtgtatgtgtatgctctcaatcagacaaggtttgaatatcaaatgagcctggaacctattaagcagacgtgctgttcatctcggcagcacaattcatgcacaacagaaaacaaaaatgagccatgcggggctcgttttggaactgcaattgctgctgtaaaagacctcaatcttgatggatttaatgacatcgtgataggagctccgctggaagatgatcacgggggagctgtgtacatttatcatggaagtggcaagactataaggaaagagtatgcacaacgtattccatcaggtggggatggtaagacactgaaattttttggccagtctatccacggagaaatggatttaaatggtgacggtctgacagatgtgactattgggggccttggtggtgctgccctcttctggtcccgagatgtggccgtagttaaagtgaccatgaattttgagccaaataaagtgaatattcaaaagaaaaactgccatatggagggaaaggaaacagtatgcataaatgctacagtgtgttttgaggttaaattaaagtctaaagaagacacgatttatgaagctgatttgcagtaccgtgtcaccctagattcactaagacaaatatcacgaagttttttctctggaactcaagagagaaaggttcaaaggaacatcacagttcgaaaatcagaatgcactaagcactccttctacatgttggacaagcatgactttcaggactctgtgagaataacgttggactttaatcttaccgatccagaaaatgggcctgttcttgatgattctctaccaaactcagtacatgaatatattccctttgccaaagattgtggaaataaggaaaaatgtatctcagacctcagcctgcatgtcgccaccactgaaaaggacctgctgattgtccgatcccagaatgataagttcaacgttagcctcacagtcaaaaatacaaaggacagtgcctataacaccaggacaatagtgcattattctccaaatctagttttttcaggaattgaggctatccaaaaagacagttgtgaatctaatcataatatcacatgtaaagttggatatcccttcctgagaagaggagagatggtaactttcaaaatattgtttcagtttaacacatcctatctcatggaaaatgtgaccatttatttaagtgcaacaagtgacagcgaagaacctcctgaaaccctttctgataatgtagtaaacatttctatcccggtaaaatatgaagttggactacagttttacagctctgcaagtgaataccacatttcaattgctgccaatgagacagtccctgaagttattaattctactgaggacattggaaatgaaattaatatcttctacttgattagaaaaagtggatcttttccaatgccagagcttaagctgtcaatttcattccccaatatgacatcaaatggttaccctgtgctgtacccaactggattgtcatcttctgagaatgcaaactgcagaccccatatctttgaggatcctttcagtatcaactctggaaagaaaatgactacatcaactgaccatctcaaacgaggcacaattctggactgcaatacatgtaaatttgctaccatcacatgtaatctcacttcttctgacatcagccaagtcaatgtttcgcttatcttgtggaaaccaacttttataaaatcatatttttccagcttaaatcttactataaggggagaacttcggagtgaaaatgcatctctggttttaagtagcagcaatcaaaaaagagagcttgctattcaaatatccaaagatgggctaccgggcagagtgccattatgggtcatcctgctgagtgcttttgccggattgttgctgttaatgctgctcattttagcactgtggaagattggattcttcaaaagaccactgaaaaagaaaatggagaaa

SEQ ID NO: 107 - protein, 272 aa, Homo sapiens
MSCHNCSDPQVLCSSGQLFLQPLWDHLRSWEALLQSPFFPVIFSITTYVGFCLPFVVLDILCSWVPALRRYKIHPDFSPSAQQLLPCLGQTLYQHVMFVFPVTLLHWARSPALLPHEAPELLLLLHHILFCLLLFDMEFFVWHLLHHKVPWLYRTFHKVHHQNSSSFALATQYMSVWELFSLGFFDMMNVTLLGCHPLTTLTFHVVNIWLSVEDHSGYNFPWSTHRLVPFGWYGGVVHHDLHHSHFNCNFAPYFTHWDKILGTLRTASVPAR

SEQ ID NO: 108 - DNA, 1360 bp, Homo sapiens
cagcctcgcaatgagctgccacaactgctccgacccccaggtcctttgcagctccgggcagctgttcctgcagcccctctgggaccacctgaggagctgggaggccctcctacagtcgcccttcttcccggtcatcttctccatcaccacatacgtgggcttttgcctgcccttcgtggtcctggatatcctgtgctcctgggtgcccgccctgcggcgctacaagatccaccctgacttctcgccatccgcgcagcagctgctaccttgcctggggcagaccctctaccagcatgtgatgtttgtgttccccgtgacgctgctgcattgggcccgcagcccggccctcctgccccacgaagctcccgagctgctcctgctgctgcaccacatcctgttctgcctgctactcttcgacatggagttcttcgtgtggcacctgctgcaccacaaggtgccctggctgtaccgcaccttccacaaggtgcaccaccagaactcgtcctcgttcgcgctggcaacgcagtatatgagcgtctgggaactgttttctttgggcttcttcgacatgatgaacgtcacactgctcgggtgccacccgctcaccaccctgaccttccacgtggtcaacatctggctttccgtggaggaccactccggctacaacttcccttggtccactcacagactggtgcccttcgggtggtacgggggtgtggtgcaccacgacctgcatcactctcactttaactgcaacttcgctccgtactttacacactgggacaaaatactgggaacgctgcggactgcatctgtcccagcgcggtgatgtggctgcggtgggtgcccctaagactcgggactgctgtgcctttcacacttgaatgaagagaaacacctgagctatatatttttttaaagcaactaacttattgctttatgtttatctatgaaaaccatagataaaatctgatgcatttttgtaatctgacaaagtaatttacatactgtttgtgtatcaatacaattttgtgttcttggtattcttagtctagctcacctcaatagccttgaatcctgcatatgaattagacattcatcactggcatatttagaatatctctaaaaggacttgtttgtagaataaggaattttctatgtttcaaagtgttctaaaacctggctaaaagaatgtatttttgtggatggtgttgacttctgactctaaaagcaatcaaacatgtttctgctggacagtgaccaagaattatagtaccttcttatatttttttatagaactgtatatttattttgaaagaaatgttattcgtgctttaaaaaggaaaaaaaaccataaaaa

SEQ ID NO: 109 - protein, 407 aa, Homo sapiens
MDGLPGRALGAACLLLLAAGWLGPEAWGSPTPPPTPAAPPPPPPPGAPGGSQDTCTSCGGFRRPEELGRVDGDFLEAVKRHILSRLQMRGRPNITHAVPKAAMVTALRKLHAGKVREDGRVEIPHLDGHASPGADGQERVSEIISFAETDGLASSRVRLYFFISNEGNQNLFVVQASLWLYLKLLPYVLEKGSRRKVRVKVYFQEQGHGDRWNMVEKRVDLKRSGWHTFPLTEAIQALFERGERRLNLDVQCDSCQELAVVPVFVDPGEESHRPFVVVQARLGDSRHRIRKRGLECDGRTNLCCRQQFFIDFRLIGWNDWIIAPTGYYGNYCEGSCPAYLAGVPGSASSFHTAVVNQYRMRGLNPGTVNSCCIPTKLSTMSMLYFDDEYNIVKRDVPNMIVEECGCA

SEQ ID NO: 110 - DNA, 3516 bp, Homo sapiens
ggatcctggagacaactttgccgtgtgacgcgccgggaggactgcagggcccgcggccgagggctcggcgccgcctgtgagcgggcccgcgcggccggctctcccgggcaccaagcttgctccgcgccactgcccgccggcccgcggcgaggacgacctgcccgtctccgccgccggcggcccttcctggcgcgaggcagtgagggcgaggcgctcaggtgcgagcgcggggccccgccgcagcgcccgccgcagcgccgcgccaagccgcgcccggctccgctccggggggctccagcgccttcgcttccgtctcagccaagttgcgtggacccgctctttcgccaccttccccagccgccggccgaaccgccgctcccactgacgctgctttcgcttcacccgaaccggggctgcggggcccccgacgcggaaaggatggggagaaggctgcagatgccgaggcgccccgagacgcccgtgcggcagtgacccgcgacctccgccccgcccggcgcgcccctcgggcccccggggccctcggcgccccttccctgccgcgcgggaacccccgaggcccggccggccccctccccctgcgagccggcggcagccctcccggcgggcgggcgggcggaggcccgggcgggcgcgggcgcgggcgggggcggggcggggcggcgcgcccggagcccggagcccggccctgcgctcggctcgactcggctcgcctcgcggcgggcgccctcgtcgccagcggcgcaccatggacgggctgcccggtcgggcgctgggggccgcctgccttctgctgctggcggccggctggctggggcctgaggcctggggctcacccacgcccccgccgacgcctgccgcgccgccgccacccccgccacccggagccccgggtggctcgcaggacacctgtacgtcgtgcggcggcttccggcggccagaggagctcggccgagtggacggcgacttcctggaggcggtgaagcggcacatcttgagccgcctgcagatgcggggccggcccaacatcacgcacgccgtgcctaaggccgccatggtcacggccctgcgcaagctgcacgcgggcaaggtgcgcgaggacggccgcgtggagatcccgcacctcgacggccacgccagcccgggcgccgacggccaggagcgcgtttccgaaatcatcagcttcgccgagacagatggcctcgcctcctcccgggtccgcctatacttcttcatctccaacgaaggcaaccagaacctgtttgtggtccaggccagcctgtggctttacctgaaactcctgccctacgtcctggagaagggcagccggcggaaggtgcgggtcaaagtgtacttccaggagcagggccacggtgacaggtggaacatggtggagaagagggtggacctcaagcgcagcggctggcataccttcccactcacggaggccatccaggccttgtttgagcggggcgagcggcgactcaacctagacgtgcagtgtgacagctgccaggagctggccgtggtgccggtgttcgtggacccaggcgaagagtcgcaccgaccctttgtggtggtgcaggctcggctgggcgacagcaggcaccgcattcgcaagcgaggcctggagtgcgatggccggaccaacctctgttgcaggcaacagttcttcattgacttccgcctcatcggctggaacgactggatcatagcacccaccggctactacggcaactactgtgagggcagctgcccagcctacctggcaggggtccccggctctgcctcctccttccacacggctgtggtgaaccagtaccgcatgcggggtctgaaccccggcacggtgaactcctgctgcattcccaccaagctgagcaccatgtccatgctgtacttcgatgatgagtacaacatcgtcaagcgggacgtgcccaacatgattgtggaggagtgcggctgcgcctgacagtgcaaggcaggggcacggtggtggggcacggagggcagtcccgggtgggcttcttccagccccccgcgggaacggggtacacggtgggctgagtacagtcattctgttgggctgtggagatagtgccagggtgcggcctgagatatttttctacagcttcatagagcaaccagtcaaaaccagagcgagaaccctcaactgacatgaaatactttaaaatgcacacgtagccacgcacagccagacgcatcctgccacccacacagcagcctccaggataccagcaaatggatgcggtgacaaatggcagcttagctacaaatgcctgtcagtcggagagaatggggtgagcagccaccattccaccagctggcccggccacgtctcgaagttgcgccttcccgagcacacataaaagcacaaagacagagacgcagagagagagagagagccacggagaggaaaagcagatgcaggggtggggagcgcagctcggcggaggctgcgtgtgccccgtggcttttaccaggcctgctctgcctggctcgatgtctgcttcttcccagcctgggatccttcgtgcttcaaggcctggggagcctgtccttccatgcccttgtcgagggaaagagacccagaaaggacacaacccgtcagagacctgggagcaggggcaatgaccgtttgactgtttgtggcttgggcctctgacatgacttatgtgtgtgtgtgtttttggggtggggagggagggagagaagagggggctaaatttgatgctttaactgatctccaacagttgacaggtcatccttgccagttgtataactgaaaaaggacttttctaccaggtatgaccttttaagtgaaaatctgaattgttctaaatggaaagaaaaaaagttgcaatctgtgcccttcattggggacattcctctaggactggtttggggacgggtgggaatgacccctaggcaaggggatgagaccgcaggaggaaatggcggggaggtggcattcttgaactgctgaggatggggggtgtcccctcagcggaggccaagggaggggagcagcctagttggtcttggagagatggggaaggctttcagctgatttgcagaagttgcccatgtgggcccaaccatcagggctggccgtggacgtggcccctgcccactcacctgcccgcctgcccgcccgcccgcatagcacttgcagacctgcctgaacgcacatgacatagcacttgccgatctgcgtgtgcccagaagtggcccttggccgagcgccgaactcgctcgccctctagatgtccaagtgccacgtgaactatgcaatttaaagggttgacccacactagacgaaactggactcgtacgactctttttatattttttatacttgaaatgaaatcctttgcttcttttttaagcgaatgattgcttttaatgtttgcactgatttagttgcatgattagtcagaaactgccatttgaaaaaaaagttatttttatagcagc

SEQ ID NO: 111 - DNA, 1389 bp, Homo sapiens
caactacagaaatttatctatgacctaatgaggcatctcggaagtcaaagaagagggaaagttaaccttttctactgatttcgtagtatattcagagctttcttttaagagctgtgaatgaaactttttctaagcactattctattgcacacaaacagaaaaccaaagccttattagacctaatttatgcataaagtagtattcctgagaactttattttggaaaatttataagaaagtaatccaaataagaaacacgatagttgaaaataatttttatagtaaataattgttttgggctgatttttcagtaaatccaaagtgacttaggttagaagttacactaaggaccaggggttggaatcagaatttagtttaagatttgaggaaaagggtaagggttagtttcagttttaggattagagctagcattgggttaggtgagaaagaaagttaaggttaaggctagagttgtctttaagggttagggttaggaccaggttaggtcagggttggattgggtttagattggggccagtgctggtgttagtgatagtgtcaggatggaggttaggtttggagtaagcgttgttgctgaagtgagttcaggctagcattaaattgtaagttctgaagctgatttggttatggggtctttcccctgtatactaccagttgtgtctttagatggcacacaagtccaaataagtggtcatacttctttattcagggtctcagctgcctgtacacctgctgcctacatcttcttggcaacaaagttacctgccacaggctctgctgagcctagttcctggtcagtaataactgaacagtgcattttggctttggatgtgtctgtggacaagcttgctgagtttctctaccatattctgagcacacggtctcttttgttctaacttcagcttcactgacactgggttgagcactactgtatgtggagggtttggtgattgggaatggatgggggacagtgaggaggacacaccagcccattagttgttaatcatcaatcacatctgattgttgaaggttattaaattaaaagaaagatcatttgtaacatactctttgtatatatttattatatgaaaggtgcaatattttattttgtacagtatgtaataaagacatgggacatatatttttcttattaacaaaatttcatattaaattgcttcactttgtatttaaagttaaaagttactatttttcatttgctattgtactttcattgttgtcattcaattgacattcctgtgtactgtattttactactgtttttataacatgagagttaatgtttctgtttcatgatccttatgtaattcagaaataaatttactttgattaaaaaaaaaaaaaaaaaaaa

SEQ ID NO: 112 - protein, 93 aa, Homo sapiens
MNAKVVVVLVLVLTALCLSDGKPVSLSYRCPCRFFESHVARANVKHLKILNTPNCALQIVARLKNNNRQVCIDPKLKWIQEYLEKALNKRFKM

SEQ ID NO: 113 - DNA, 3541 bp, Homo sapiens
  misc_feature (1282)..(1282): n = a, c, g, or t
  misc_feature (1522)..(1522): n = a, c, g, or t
  misc_feature (1840)..(1841): n = a, c, g, or t
  misc_feature (1845)..(1845): n = a, c, g, or t
  misc_feature (1851)..(1851): n = a, c, g, or t
  misc_feature (1855)..(1855): n = a, c, g, or t
  misc_feature (1864)..(1864): n = a, c, g, or t
  misc_feature (1903)..(1903): n = a, c, g, or t
  misc_feature (2109)..(2109): n = a, c, g, or t
  misc_feature (2218)..(2218): n = a, c, g, or t
  misc_feature (2476)..(2476): n = a, c, g, or t
  misc_feature (2488)..(2488): n = a, c, g, or t
  misc_feature (2574)..(2574): n = a, c, g, or t
  misc_feature (2734)..(2734): n = a, c, g, or t
  misc_feature (2753)..(2753): n = a, c, g, or t
  misc_feature (2774)..(2774): n = a, c, g, or t
  misc_feature (3259)..(3259): n = a, c, g, or t
  misc_feature (3381)..(3381): n = a, c, g, or t
  misc_feature (3398)..(3398): n = a, c, g, or t
cgcggccgcagccgcattgcccgctcggcgtccggcccccgacccgcgctcgtccgcccgcccgcccgcccgcccgcgccatgaacgccaaggtcgtggtcgtgctggtcctcgtgctgaccgcgctctgcctcagcgacgggaagcccgtcagcctgagctacagatgcccatgccgattcttcgaaagccatgttgccagagccaacgtcaagcatctcaaaattctcaacactccaaactgtgcccttcagattgtagcccggctgaagaacaacaacagacaagtgtgcattgacccgaagctaaagtggattcaggagtacctggagaaagctttaaacaagaggttcaagatgtgagagggtcagacgcctgaggaacccttacagtaggagtccagctctgaaaccagtgttagggaagggcctgccacagcctcccctgccagggcagggccccaggcattgccaagggctttgttttggacactttgccatattttcaccatttgattatgtagcaaaatacatgacatttatttttcatttagtttgattattcagtgtcactggcgacacgtagcagcttagactaaggccattattgtacttgccttattagagtgtctttccacggagccactcctctgactcagggctcctgggttttggattctctgagctgtgcaggtggggagactgggctgagggagcctggccccatggtcagccctagggtggagagccaccaagagggacgcctgggggtgtcaggaccagtcaacctgggcaaagcctagtgaaggcttctctctgtgggatgggatggtggagggccacatgggaggttcacccccttctccatccacatggtgagccgggtctgcctcttctgggagggcagcagggctaccctgagctgaggcagcagtgtgaggccagggcagagtgagacccagccctcatcccgagcacctccacatcctccacgttctgctcatcattctctgtctcatccatcatcatgtgtgtccacgactgtctccatggccccgcaaaaggactctcaggaccaaagctttcatgtaaactgtgcaccaagcaggaaatgaaaatgtcttgtgttacctgaaaacactgtgcacatctgtgtcttgtttggaatattgtccattgtccaatcctatgtttttggtcaaagccagcgtcctcctctgtgaccaatgtcttgatgcatgcactgttccccctgtgcagccgctgagcgaggagatgctccntgggccctttgagtgcagtcctgatcagagccgtggtcctttggggtgaactaccttggttcccccactgatcacaaaaacatggtgggtccatgggcagagcccaagggaattcggtgtgcaccagggttgaccccagaggattgctgccccatcagtgctccctcacatgtcagtaccttcaaactagggccaagcccagcactgcttgaggaaaacaagcattcacaacttgttttnggtttttaaaacccagtccacaaaataaccaatcctggacatgaagattctttcccaattcacatctaacctcatcttcttcaccatttggcaatgccatcatctcctgccttcctcctgggccctctctgctctgcgtgtcacctgtgcttcgggcccttcccacaggacatttctctaagagaacaatgtgctatgtgaagagtaagtcaacctgcctgacatttggagtgttccccttccactgagggcagtcgatagagctgtattaagccacttaaaatgtttgtcactttgccaaggcaagcacttgtgggnnttgnttgttntcantcagtcttncgaatactttttccccttgataaagactccagttaaaanaaattttaatgaagaaagtggaaacaaggaagtcaaagcaaggaaactatgtaacatgtaggaagtaggaagtaaattatagtgatgtaatcttgaattgtaactgttcttgaatttaataatctgtagggtaattagtaacatgtgttaagtattttcataagtatttcaaattggagcttcatggcagaaggcaaacccatcancaaaaattgtcccttaaacaaaaattaaaatcctcaatccagctatgttatattgaaaaaatagagcctgagggatctttactagttataaagatacagaactctttcnaaaccttttgaaattaacctctcactataccagtataattgagttttcagtggggcagtcattatccaggtaatccaagatattttaaaatctgtcacgtagaacttggatgtacctgcccccaatccatgaaccaagaccattgaattcttggttgaggaaacaaacatgaccctaaatcttgactacagtcaggaaaggaatcatttctatttctcctccatgggagaaaatagataagagtagaaactgcagggnaaaattatttgnataacaattcctctactaacaatcagctccttcctggagactgcccagctaaagcaatatgcatttaaatacagtcttccatttgnaagggaaaagtctcttgtaatccgaatctctttttggtttcgaactgctagtcaagtgcgtccacgagctgtttactagggatccctcatctgtccctccgggacctggtgctgcctctacctgacactcccttgggctccctgtaacctcttcagaggncctcgctgccagctctgtntcaggacccagaggaaggggncagaggctcgttgactggctgtgtgttgggattgagtctgtgccacgtgtttgtgctgtggtgtgtcccctctgtccaggcactgagataccagcgaggaggctccagagggcgctctgcttgttattagagattacctcctgagaaaaaaggttccgcttggagcagaggggctgaatagcagaaggttgcacctcccccaaccttagatgttctaagtctttccattggatctcattggacccttccatggtgtgatcgtctgactggtgttatcaccgtgggctccctgactgggagttgatcgcctttcccaggtgctacacccttttccagctggatgagaatttgagtgctctgatccctctacagagcttccctgactcattctgaaggagccccattcctgggaaatattccctagaaacttccaaatcccctaagcagaccactgataaaaccatgtagaaaatttgttattttgnaacctcgctggactctcagtctctgagcagtgaatgattcagtgttaaatgtgatgaatactgtattttgtattgtttcaattgcatctcccagataatgtgaaaatggtccaggagaaggncaattcctatacgcagngtgctttaaaaaataaataagaaacaactctttgagaaacaacaatttctactttgaagtcataccaatgaaaaaatgtatatgcacttataattttcctaataaagttctgtactcaaatgtaaaaaaaaaaaaaaaaaaaa

SEQ ID NO: 114 - DNA, 351 bp, Homo sapiens
  misc_feature (46)..(46): n = a, c, g, or t
  misc_feature (105)..(106): n = a, c, g, or t
  misc_feature (204)..(204): n = a, c, g, or t
  misc_feature (302)..(302): n = a, c, g, or t
  misc_feature (317)..(317): n = a, c, g, or t
cgagagcctgcaggagaagtcgcagtgcgcactggaggagtacgtnaggagccagtaccccaaccagcccagccgttttggcaaactgctgctgcgactgccctnnctgcgcaccgtgtcctcctccgtcatcgagcagctcttcttcgtccgtttggtaggtaaaacccccatcgaaactctcatccgcgatatgttactgtntgggagcagcttcaactggccttacatgtccatccagtgctcctagaccttgggcgcttcccacctgccccgtccccctagagactcagaggacccancttgggccaaggaantccaaagccgcgggggacaacggggaagttcaag

SEQ ID NO: 115 - protein, 274 aa, Homo sapiens
VIRMPFSHLSTYSLVWVMAAVVLCTAQVQVVTQDEREQLYTTASLKCSLQNAQEALIVTWQKKKAVSPENMVTFSENHGVVIQPAYKDKINITQLGLQNSTITFWNITLEDEGCYMCLFNTFGFGKISGTACLTVYVQPIVSLHYKFSEDHLNITCSATARPAPMVFWKVPRSGIENSTVTLSHPNGTTSVTSILHIKDPKNQVGKEVICQVLHLGTVTDFKQTVNKGYWFSVPLLLSIVSLVILLVLISILLYWKRHRNQDRGELSQGVQKMT

SEQ ID NO: 116 - DNA, 210 bp, Homo sapiens
ttccttggatttgtccaaatccaaacccccatttctgtactttgctttctgtcttcaggtgatcaggatgcccttctctcatctgtctacctacagcctggtttgggtcatggcagcagtggtgctgtgcacagcacaaggtaaagaaactcaattcccctgcttggagcccagcaaacacaatttctggggtgaagacatttagccaga

SEQ ID NO: 117 - protein, 189 aa, Homo sapiens
MVMLLLLLSALAGLFGAAEGQAFHLGKCPNPPVQENFDVNKYLGRWYEIEKIPTTFENGRCIQANYSLMENGKIKVLNQELRADGTVNQIEGEATPVNLTEPAKLEVKFSWFMPSAPYWILATDYENYALVYSCTCIIQLFHVDFAWILARNPNLPPETVDSLKNILTSNNIDVKKMTVTDQVNCPKLS

SEQ ID NO: 118 - DNA, 809 bp, Homo sapiens
atgcctgtcttcatcttgaaagaaaagctccaggtcccttctccagccacccagccccaagatggtgatgctgctgctgctgctttccgcactggctggcctcttcggtgcggcagagggacaagcatttcatcttgggaagtgccccaatcctccggtgcaggagaattttgacgtgaataagtatctcggaagatggtacgaaattgagaagatcccaacaacctttgagaatggacgctgcatccaggccaactactcactaatggaaaacggaaagatcaaagtgttaaaccaggagttgagagctgatggaactgtgaatcaaatcgaaggtgaagccaccccagttaacctcacagagcctgccaagctggaagttaagttttcctggtttatgccatcggcaccgtactggatcctggccaccgactatgagaactatgccctcgtgtattcctgtacctgcatcatccaactttttcacgtggattttgcttggatcttggcaagaaaccctaatctccctccagaaacagtggactctctaaaaaatatcctgacttctaataacattgatgtcaagaaaatgacggtcacagaccaggtgaactgccccaagctctcgtaaccaggttctacagggaggctgcacccactccatgttacttctgcttcgctttcccctaccccacccccccccataaagacaaaccaatcaaccacgacaaaggaagttgacctaaacatgtaaccatgccctaccctgttaccttgctagctgcaaaataaacttgttgctgacctgc

SEQ ID NO: 119 - protein, 211 aa, Homo sapiens
MTPWLGLIVLLGSWSLGDWGAEACTCSPSHPQDAFCNSDIVIRAKVVGKKLVKEGPFGTLVYTIKQMKMYRGFTKMPHVQYIHTEASESLCGLKLEVNKYQYLLTGRVYDGKMYTGLCNFVERWDQLTLSQRKGLNYRYHLGCNCKIKSCYYLPCFVTSKNECLWTDMLSNFGYPGYQSKHYACIRQKGGYCSWYRGWAPPDKSIINATDP

SEQ ID NO: 120 - DNA, 5487 bp, Homo sapiens
tctgtcgacttgccccagagctgatccttgtctttgtccacttctcagcgaggatggcacttcagggagcccttcccttactatcgcagagagagcaggccctccccagtcatgtccaacccagaactctgttttgttttcttcatagccctagcatcacagaaaatcaccctgtgcattcatggatgtccacgggggcaagggctttgtgttgcttaacccagcatcctgaaccgtgtttgttgaatgaatacagaaccccgtttgctctgggagagcacagaaaacagtcttctatcatatatcatagccagctgcaaacagcagatggcttcccatatcccagagagtaagaaccagagagagagagaaagagagagagtttgggtctttctcctctgtgcctgctctctccagagaaactggaggggtagcagttagcattcccccgctggttccaccaagcacagtcaaggtctctaggacatggccacccctcacctgtggaagcggtcctgctggggtgggtgggtgttagttggttctggtttgggtcagagacacccagtggcccaggtgggcgtggggccagggcgcagacgagaaggggcacgagggctccgctccgaggacccagcggcaagcaccggtcccgggcgcgccccagcccacccactcgcgtgcccacggcggcattattccctataaggatctgaacgatccgggggcggccccgccccgttaccccttgcccccggccccgccccctttttggagggccgatgaggtaatgcggctctgccattggtctgagggggcgggccccaacagcccgaggcggggtccccgggggcccagcgctatatcactcggccgcccaggcagcggcgcagagcgggcagcaggcaggcggcgggcgctcagacggcttctcctcctcctcttgctcctccagctcctgctccttcgccgggaggccgcccgccgagtcctgcgccagcgccgaggcagcctcgctgcgccccatcccgtcccgccgggcactcggagggcagcgcgccggaggccaaggttgccccgcacggcccggcgggcgagcgagctcgggctgcagcagccccgccggcggcgcgcacggcaactttggagaggcgagcagcagccccggcagcggcggcagcagcggcaatgaccccttggctcgggctcatcgtgctcctgggcagctggagcctgggggactggggcgccgaggcgtgcacatgctcgcccagccacccccaggacgccttctgcaactccgacatcgtgatccgggccaaggtggtggggaagaagctggtaaaggaggggcccttcggcacgctggtctacaccatcaagcagatgaagatgtaccgaggcttcaccaagatgccccatgtgcagtacatccacacggaagcttccgagagtctctgtggccttaagctggaggtcaacaagtaccagtacctgctgacaggtcgcgtctatgatggcaagatgtacacggggctgtgcaacttcgtggagaggtgggaccagctcaccctctcccagcgcaaggggctgaactatcggtatcacctgggttgtaactgcaagatcaagtcctgctactacctgccttgctttgtgacttccaagaacgagtgtctctggaccgacatgctctccaatttcggttaccctggctaccagtccaaacactacgcctgcatccggcagaagggcggctactgcagctggtaccgaggatgggcccccccggataaaagcatcatcaatgccacagacccctgagcgccagaccctgccccacctcacttccctcccttcccgctgagcttcccttggacactaactcttcccagatgatgacaatgaaattagtgcctgttttcttgcaaatttagcacttggaacatttaaagaaaggtctatgctgtcatatggggtttattgggaactatcctcctggccccaccctgccccttctttttggttttgacatcattcatttccacctgggaatttctggtgccatgccagaaagaatgaggaacctgtattcctcttcttcgtgataatataatctctatttttttaggaaaacaaaaatgaaaaactactccatttgaggattgtaattcccacccctcttgcttcttccccacctcaccatctcccagaccctcttccctttgcccttctcctccaatacataaaggacacagacaaggaacttgctgaaaggccaaccatttcaggatcagtcaaaggcagcaagcagatagactcaaggtgtgtgaaagatgttatacaccaggagctgccactgcatgtcccaaccagactgtgtctgtctgtgtctgcatgtaagagtgagggagggaaggaaggaactacaagagagtcggagatgatgcagcacacacacaattccccagcccagtgatgcttgtgttgaccagatgttcctgagtctggagcaagcacccaggccagaataacagagctttcttagttggtgaagacttaaacatctgcctgaggtcaggaggcaatttgcctgccttgtacaaaagctcaggtgaaagactgagatgaatgtctttcctctccctgcctcccaccagacttcctcctggaaaacgctttggtagatttggccaggagctttcttttatgtaaattggataaatacacacaccatacactatccacagatatagccaagtagatttgggtagaggatactatttccagaatagtgtttagctcacctagggggatatgtttgtatacacatttgcatatacccacatggggacataagctaatttttttacaggacacagaattctgttcaatgctgttaaatatgccaatagtttaatctcttctattttgttgtcgttgcttgtttgaagaaaatcatgacattccaagttgacatttttttttcattttaattaaaatttgaaattctgaacaccgtcagcaccctctcttccctatcatgggtcatctgacccctgtccgtctccttgtccctgcttcatgtttgggggcctttctttaactgccttcctggcttagctcagatggcagatgagagtgtagtcaagggcctgggcacaggagggagagctgcagagtgtcctgcctgccttggctggagggacacctctcctgggtgtggagacagcttggttccctttccctagctccctggtgggtgaatgccacctcctgagatcctcacctcttggaattaaaattgttggtcactggggaaagcctgagtttgcaaccagttgtagggtttctgttgtgtttttttttttttttttgaaataaaactataatataaattctcctattaaataaaattattttaagttttagtgtcaaaagtgagatgctgagagtaggtgataatgtatattttacagagtgggggttggcaggatggtgacattgaacatgattgctctctgtctcttttttcagcttatgggtatttatcttctattagtatttgtatcttcagttcattccactttaggaaacagagctgccaattgaaacagaagaagaaaaaaaaaaaaagcagcagacaacacactgtagagtcttgcacacacacaagtgcccaggcaaggtgcttggcagaaccgcagagtgggaagagagtaccggcatcgggtttccttgggatcaatttcattaccgtgtacctttcccattgtggtcatgccatttggcagggggagaatgggaggcttggccttctttgtgaggcagtgtgagcagaagctgatgccagcatgtcactggttttgaagggatgagcccagacttgatgttttgggattgtccttattttaacctcaaggtctcgcatggtggggcccctgaccaacctacacaagttccctcccacaagtggacatcagtgtcttctctgtgaggcatctggccattcgcactccctggtgtggtcagcctctctcacacaaggaggaacttgggtgaaggctgagtgtgaggcacctgaagtttccctgcggagtcgataaattagcagaaccacatccccatctgttaggccttggtgaggaggccctgggcaaagaagggtctttcgcaaagcgatgtcagagggcggttttgagctttctataagctatagctttgtttatttcacccgttcacttactgtataatttaaaatcatttatgtagctgagacacttctgtatttcaatcatatcatgaacattttattttgctaaatcttgtgtcatgtgtaggctgtaatatgtgtacattgtgtttaagagaaaaatgaaacccacatgccgccattttcctgaatcaaattctgcagtggaatggagaggaaaatacttctaggcaagcagctagactggtgaattgggggaaatagaaggaactagtaactgagactcctccagcctcctccctattggaatcccaatggctcctggagtaggaaaaaagtttaaactacattcatgttcttgttctgtgtcactcggccctgggtagtctaccatttacttcaccccaagtcctgctgcccatccagttgggaagccatgattttcctaagaatccagggccatgggagatacaattccaagttctcgcttcctcctttgggcatctcttctgcctcccaatcaaggaagctccatgctcaggctctcagctctcgggccagtgctctgctctgtccagggtaggtaatactgggagactcctgtcttttaccctcccctcgttccagacctgcctcatggtggcaacatggttcttgaacaattaaagaaacaaatgactttttggaatagccctgtctagggcaaactgtggcccccaggagacactacccttccatgccccagacctctgtcttgcatgtgacaattgacaatctggactaccccaagatggcacccaagtgtttggcttctggctacctaaggttaacatgtcactagagtatttttatgagagacaaacattataaaaatctgatggcaaaagcaaaacaaaatggaaagtaggggaggtggatgtgacaacaacttccaaattggctctttggaggcgagaggaaggggagaacttggagaatagtttttgctttgggggtagaggcttcttagattctcccagcatccgcctttccctttagccagtctgctgtcctgaaacccagaagtgatggagagaaaccaacaagagatctcgaaccctgtctagaaggaatgtatttgttgctaaatttcgtagcactgtttacagttttcctccatgttatttatgaattttatattccgtgaatgtatattgtcttgtaatgttgcataatgttcactttttatagtgtgtcctttattctaaacagtaaagtggttttatttctatcac

SEQ ID NO: 121 - protein, 501 aa, Homo sapiens
MSSSGTPDLPVLLTDLKIQYTKIFINNEWHDSVSGKKFPVFNPATEEELCQVEEGDKEDVDKAVKAARQAFQIGSPWRTMDASERGRLLYKLADLIERDRLLLATMESMNGGKLYSNAYLNDLAGCIKTLRYCAGWADKIQGRTIPIDGNFFTYTRHEPIGVCGQIIPWNFPLVMLIWKIGPALSCGNTVVVKPAEQTPLTALHVASLIKEAGFPPGVVNIVPGYGPTAGAAISSHMDIDKVAFTGSTEVGKLIKEAAGKSNLKRVTLELGGKSPCIVLADADLDNAVEFAHHGVFYHQGQCCIAASRIFVEESIYDEFVRRSVERAKKYILGNPLTPGVTQGPQIDKEQYDKILDLIESGKKEGAKLECGGGPWGNKGYFVQPTVFSNVTDEMRIAKEEIFGPVQQIMKFKSLDDVIKRANNTFYGLSAGVFTKDIDKAITISSALQAGTVWVNCYGVVSAQCPFGGFKMSGNGRELGEYGFHEYTEVKTVTVKISQKNS

SEQ ID NO: 122 - DNA, 2116 bp, Homo sapiens
atcagaaccaaattgctgagccagtcacctgtgttccaggagccgaatcagaaatgtcatcctcaggcacgccagacttacctgtcctactcaccgatttgaagattcaatatactaagatcttcataaacaatgaatggcatgattcagtgagtggcaagaaatttcctgtctttaatcctgcaactgaggaggagctctgccaggtagaagaaggagataaggaggatgttgacaaggcagtgaaggccgcaagacaggcttttcagattggatccccgtggcgtactatggatgcttccgagagggggcgactattatacaagttggctgatttaatcgaaagagatcgtctgctgctggcgacaatggagtcaatgaatggtggaaaactctattccaatgcatatctgaatgatttagcaggctgcatcaaaacattgcgctactgtgcaggttgggctgacaagatccagggccgtacaataccaattgatggaaatttttttacatatacaagacatgaacctattggtgtatgtggccaaatcattccttggaatttcccgttggttatgctcatttggaagatagggcctgcactgagctgtggaaacacagtggttgtcaaaccagcagagcaaactcctctcactgctctccacgtggcatctttaataaaagaggcagggtttcctcctggagtagtgaatattgttcctggttatgggcctacagcaggggcagccatttcttctcacatggatatagacaaagtagccttcacaggatcaacagaggttggcaagttgatcaaagaagctgccgggaaaagcaatctgaagagggtgaccctggagcttggaggaaagagcccttgcattgtgttagctgatgccgacttggacaatgctgttgaatttgcacaccatggggtattctaccaccagggccagtgttgtatagccgcatccaggatttttgtggaagaatcaatttatgatgagtttgttcgaaggagtgttgagcgggctaagaagtatatccttggaaatcctctgaccccaggagtcactcaaggccctcagattgacaaggaacaatatgataaaatacttgacctcattgagagtgggaagaaagaaggggccaaactggaatgtggaggaggcccgtgggggaataaaggctactttgtccagcccacagtgttctctaatgttacagatgagatgcgcattgccaaagaggagatttttggaccagtgcagcaaatcatgaagtttaaatctttagatgacgtgatcaaaagagcaaacaatactttctatggcttatcagcaggagtgtttaccaaagacattgataaagccataacaatctcctctgctctgcaggcaggaacagtgtgggtgaattgctatggcgtggtaagtgcccagtgcccctttggtggattcaagatgtctggaaatggaagagaactgggagagtacggtttccatgaatatacagaggtcaaaacagtcacagtgaaaatctctcagaagaactcataaagaaaatacaagagtggagagaagctcttcaatagctaagcatctccttacagtcactaatatagtagattttaaagacaaaatttttcttttcttgatttttttaaacataagctaaatcatattagtattaatactacccatagaaaacttgacatgtagcttcttctgaaagaattatttgccttctgaaatgtgacccccaagtcctatcctaaataaaaaaagacaaattcggatgtatgatctctctagctttgtcatagttatgtgattttcctttgtagctacttttgcaggataataattttatagaaaaggaacagttgcatttagcttctttcccttagtgactcttgaagtacttaacatacacgttaactgcagagtaaattgctctgttcccagtagttataaagtccttggactgttttgaaaagtttcctaggatgtcatgtctgcttgtcaaaagaaataatccctgtaatatttagctgtaaactgaatataaagcttaataaaaacaaccttgcatgaaaaaaaaaaaaaaaaaaaaa

SEQ ID NO: 123 - protein, 737 aa, Homo sapiens
MPDHDSTALLSRQTKRRRVDIGVKRTVGTASAFFAKARATFFSAMNPQGSEQDVEYSVVQHADGEKSNVLRKLLKRANSYEDAMMPFPGATIISQLLKNNMNKNGGTEPSFQASGLSSTGSEVHQEDICSNSSRDSPPECLSPFGRPTMSQFDMDRLCDEHLRAKRARVENIIRGMSHSPSVALRGNENEREMAPQSVSPRESYRENKRKQKLPQQQQQSFQQLVSARKEQKREERRQLKQQLEDMQKQLRQLQEKFYQIYDSTDSENDEDGNLSEDSMRSEILDARAQDSVGRSDNEMCELDPGQFIDRARALIREQEMAENKPKREGNNKERDHGPNSLQPEGKHLAETLKQELNTAMSQVVDTVVKVFSAKPSRQVPQVFPPLQIPQARFAVNGENHNFHTANQRLQCFGDVIIPNPLDTFGNVQMASSTDQTEALPLVVRKNSSDQSASGPAAGGHHQPLHQSPLSATTGFTTSTFRHPFPLPLMAYPFQSPLGAPSGSFSGKDRASPESLDLTRDTTSLRTKMSSHHLSHHPCSPAHPPSTAEGLSLSLIKSECGDLQDMSEISPYSGSAMQEGLSPNHLKKAKLMFFYTRYPSSNMLKTYFSDVKFNRCITSQLIKWFSNFREFYYIQMEKYARQAINDGVTSTEELSITRDCELYRALNMHYNKANDFEVPERFLEVAQITLREFFNAIIAGKDVDPSWKKAIYKVICKLDSEVPEIFKSPNCLQELLHE

SEQ ID NO: 124 - DNA, 3097 bp, Homo sapiens
ggcacgaggccccttttccagaatcacttgcactgtcttgttcttgaatgagaaaggaagaaaagagcctcccattactcagacccgtgtaaacattattccccccaggagaaaatggtgttattcaaatgaatcataataaaatagcctctaaacagtttctaagcgggagcctccgtggaactcagcgctccgctcctcccagttcctaagaggtcccgggattcttgagctgtgcccagctgacgagcttttgaagatggcacaataaccgtccagtgatgcctgaccatgacagcacagccctcttaagccggcaaaccaagaggagaagagttgacattggagtgaaaaggacggtagggacagcatctgcattttttgctaaggcaagagcaacgttttttagtgccatgaatccccaaggttctgagcaggatgttgagtattcagtggtgcagcatgcagatggggaaaagtcaaatgtactccgcaagctgctgaagagggcgaactcgtatgaagatgccatgatgccttttccaggagcaaccataatttcccagctgttgaaaaataacatgaacaaaaatggtggcacggagcccagtttccaagccagcggtctctctagtacaggctccgaagtacatcaggaggatatatgcagcaactcttcaagagacagccccccagagtgtctttccccttttggcaggcctactatgagccagtttgatatggatcgcttatgtgatgagcacctgagagcaaagcgcgcccgggttgagaatataattcggggtatgagccattcccccagtgtggcattaaggggcaatgaaaatgaaagagagatggccccgcagtctgtgagtccccgagaaagttacagagaaaacaaacgcaagcaaaagcttccccagcagcagcaacagagtttccagcagctggtttcagcccgaaaagaacagaagcgagaggagcgccgacagctgaaacagcagctggaggacatgcagaaacagctgcgccagctgcaggaaaagttctaccaaatctatgacagcactgattcggaaaatgatgaagatggtaacctgtctgaagacagcatgcgctcggagatcctggatgccagggcccaggactctgtcggaaggtcagataatgagatgtgcgagctagacccaggacagtttattgaccgagctcgagccctgatcagagagcaggaaatggctgaaaacaagccgaagcgagaaggcaacaacaaagaaagagaccatgggccaaactccttacaaccggaaggcaaacatttggctgagaccttgaaacaggaactgaacactgccatgtcgcaagttgtggacactgtggtcaaagtcttttcggccaagccctcccgccaggttcctcaggtcttcccacctctccagatcccccaggccagatttgcagtcaatggggaaaaccacaatttccacaccgccaaccagcgcctgcagtgctttggcgacgtcatcattccgaaccccctggacacctttggcaatgtgcagatggccagttccactgaccagacagaagcactgcccctggttgtccgcaaaaactcctctgaccagtctgcctccggccctgccgctggcggccaccaccagcccctgcaccagtcgcctctctctgccaccacgggcttcaccacgtccaccttccgccaccccttcccccttcccttgatggcctatccatttcagagcccattaggtgctccctccggctccttctctggaaaagacagagcctctcctgaatccttagacttaactagggataccacgagtctgaggaccaagatgtcatctcaccacctgagccaccacccttgttcaccagcacacccgcccagcaccgccgaagggctctccttgtcgctcataaagtccgagtgcggcgatcttcaagatatgtctgaaatatcaccttattcgggaagtgcaatgcaggaaggattgtcacccaatcacttgaaaaaagcaaagctcatgtttttttatacccgttatcccagctccaatatgctgaagacctacttctccgacgtaaagttcaacagatgcattacctctcagctcatcaagtggtttagcaatttccgtgagttttactacattcagatggagaagtacgcacgtcaagccatcaacgatggggtcaccagtactgaagagctgtctataaccagagactgtgagctgtacagggctctgaacatgcactacaataaagcaaatgactttgaggttccagagagattcctggaagttgctcagatcacattacgggagtttttcaatgccattatcgcaggcaaagatgttgatccttcctggaagaaggccatatacaaggtcatctgcaagctggatagtgaagtccctgagattttcaaatccccgaactgcctacaagagctgcttcatgagtagaaatttcaacaactctttttgaatgtatgaagagtagcagtcccctttggatgtccaagttatatgtgtctagattttgatttcatatatatgtgtatgggaggcatggatatgttatgaaatcagctggtaattcctcctcatcacgtttctctcattttcttttgttttccattgcaaggggatggttgttttctttctgcctttagtttgcttttgcccaaggcccttaacatttggacacttaaaatagggttaattttcagggaaaaagaatgttggcgtgtgtaaagtctctattagcaatgaagggaatttgttaacgatgcatccacttgattgatgacttattgcaaatggcggttggctgaggaaaacccatgacacagcacaactctacagacagtgatgtgtctcttgtttctactgctaagaaggtctgaaaatttaatgaaaccacttcatacatttaagtattttgtttggtttgaactcaatcagtagcttttccttacatgtttaaaaataattccaatgacagatgagcagctcacttttccaaagtaccccaaaaggccaaattaaaaaaaaaaaaaaaaaaa

SEQ ID NO: 125 - protein, 103 aa, Homo sapiens
MKSLILLAILAALAVVTLCYESHESMESYELNPFINRRNANTFISPQQRWRAKVQERIRERSKPVHELNREACDDYRLCERYAMVYGYNAAYNRYFRKRRGAK

SEQ ID NO: 126 - DNA, 603 bp, Homo sapiens
cgtgctgctacacaagaaccctgagactgacctgcaggacgaaaccatgaagagcctgatccttcttgccatcctggccgccttagcggtagtaactttgtgttatgaatcacatgaaagcatggaatcttatgaacttaatcccttcattaacaggagaaatgcaaataccttcatatcccctcagcagagatggagagctaaagtccaagagaggatccgagaacgctctaagcctgtccacgagctcaatagggaagcctgtgatgactacagactttgcgaacgctacgccatggtttatggatacaatgctgcctataatcgctacttcaggaagcgccgaggggccaaatgagactgagggaagaaaaaaaatctctttttttctggaggctggcacctgattttgtatccccctgtagcagcattactgaaatacataggcttatatacaatgcttctttcctgtatattctcttgtctggctgcacccctttttcccgcccccagattgataagtaatgaaagtgcactgcagtgagggtcaaaggagagtcaacatatgtgattgttccataataaacttctggtgtgatactt

SEQ ID NO: 127 - protein, 430 aa, Homo sapiens [sequence omitted]

SEQ ID NO: 128 - DNA, 1468 bp, Homo sapiens
gacaccgtggggggtaggtttgatgccactcaggcatttgtcggggagctcagccagttcaacatatgggaccgcgtccttcgcgcacaagaaattgtcaacatcgccaactgctccacaaacatgccgggcaacatcatcccgtgggtggacaataacgtcgatgtgttcggaggggcctccaagtggcccgtggagacgtgtgaggaggctctccttgacttgtagccgccttctcctctgtccaggaggccgggatcaggctgttgccatggaagttcagggccatagactgccccacttaaactcttgtcagtctgggctcagggttcccagagctcattccccaggaatctctaagaccagggctggggcagtgtctgtcactggcttgtttgttccctaccaatattctgttgctgtttgaagtagtgccagggtcccctgggaagatgcccccaagacacctgccccaagtgggtggatatctgccttcctgctgcaagtggaggcaggtccagcagcccctcttcagagcccctgtaaatgctatcgcagcctgagtcctgccgccttccagttccttggtgtcccgtgcaccccttctgtctgtcccctttcatgctgtgcagccgtcccgctggagtggccatgtcccttgtgcattgagtgcatccccgctggtgactaagctcgcagcaagcgctacccccgatctgcaaaagggcctctccctttgtgttctatacattgtgaatcttcccgtctgaagaacgcccagcctgcccagacaaagccccgccttccccaaagcagaggggctgtctgtgtctccagaaaggggacatcggggggggaggggggctcagaaaggagaagggctgtgatctccggtcccttcccccatcatccttccttagactgatgctttgactgaatcatcactagctatggcattaaaaggcctctcttctcatctggtgccaaaggttccgttgcagctttttacaaccatccggtgtggtttggaggatttgttttttttttttcccaacagaaaagaacagccattagaagaaggctcccattttctgatgttccgccccactgtgaagagtgtgctcgttttaaattcatgttgattcttgtaagcactggactgtcttcatcaagtatttcccctacagaactcctcaagaaaaacagagatcatttggctagagattgtctgagtgactccaagctactcactgtattggacgggagtagtaatttattttaaagataaagtgactaagtggggaaatttataaagctaaatattatatattttatttttcatacatgtttgaagtgcaaatctgtggatattccatttgtaggaccaagtcgacatgcccatcctgacattgtatgctacgagaactcttctgatgatggaatttcgattaaagtgcactgaaagatg

SEQ ID NO: 129 - protein, 51 aa, Homo sapiens
MKFFVFALILALMLSMTGADSHAKRHHGYKRKFHEKHHSHRGYRSNYLYDN

SEQ ID NO: 130 - DNA, 524 bp, Homo sapiens
atctcttgagacttcacttcagcttcactgacttctggattctcctcttgagtaaaaggactcagccaactatgaagttttttgtttttgctttaatcttggctctcatgctttccatgactggagctgattcacatgcaaagagacatcatgggtataaaagaaaattccatgaaaagcatcattcacatcgaggctatagatcaaattatctgtatgacaattgatatcttcagtaatcatggggcatgattatggaggtttgactggcaaattcgctttggactcgtgtattctcatttgtcataccgcatcacactaccactgctttttgaagaattatcataaggcaatgcagaataaaagaaataccatgatttagtgaattctgtgtttcaggatacttcccttcctaattatcatttgattagatacttgcaatttaaatgttaagctgttttcactgctgtttctgagtaatagaaattcattcctctccaaaagcaataaaattcaagcacatt

SEQ ID NO: 131 - protein, 706 aa, Homo sapiens
MSSDASQGVITTPPPPSMPHKERYFDRINENDPEYIRERNMSPDLRQDFNMMEQRKRVTQILQSPAFREDLECLIQEQMKKGHNPTGLLALQQIADYIMANSFSGFSSPPLSLGMVTPINDLPGADTSSYVKGEKLTRCKLASLYRLVDLFGWAHLANTYISVRISKEQDHIIIIPRGLSFSEATASNLVKVNIIGEVVDQGSTNLKIDHTGFSPHAAIYSTRPDVKCVIHIHTLATAAVSSMKCGILPISQESLLLGDVAYYDYQGSLEEQEERIQLQKVLGPSCKVLVLRNHGVVALGETLEEAFHYIFNVQLACEIQVQALAGAGGVDNLHVLDFQKYKAFTYTVAASGGGGVNMGSHQKWKVGEIEFEGLMRTLDNLGYRTGYAYRHPLIREKPRHKSDVEIPATVTAFSFEDDTVPLSPLKYMAQRQQREKTRWLNSPNTYMKVNVPEESRNGETSPRTKITWMKAEDSSKVSGGTPIKIEDPNQFVPLNTNPNEVLEKRNKIREQNRYDLKTAGPQSQLLAGIVVDKPPSTMQFEDDDHGPPAPPNPFSHLTEGELEEYKRTIERKQQGLEDAEQELLSDDASSVSQIQSQTQSPQNVPEKLEENHELFSKSFISMEVPVMVVNGKDDMHDVEDELAKRVSRLSTSTTIENIEITIKSPEKIEEVLSPEGSPSKSPSKKKKKFRTPSFLKKNKKKEKVEA

SEQ ID NO: 132 - DNA, 2864 bp, Homo sapiens
agataacaagagtaatccacagacttaaaacatgagctcagatgccagccaaggcgtgattaccactcctcctcctcccagcatgcctcacaaagagagatattttgaccgcatcaatgaaaatgacccagaatacattagggagaggaacatgtctcctgatctacgacaagacttcaacatgatggagcagaggaaacgagttactcagatcctgcaaagtcctgcctttcgggaagacttggaatgccttattcaagaacagatgaagaaaggccacaacccaactggattactagcattacagcagattgcagattacatcatggccaattctttctcgggtttttcttcacctcctctcagtcttggcatggtcacacctatcaatgaccttcctggtgcagatacatcctcatatgtgaagggagaaaaacttactcgctgtaaacttgccagcctgtacagacttgtagacttgtttggatgggcacacctggcaaatacctatatctcagtaagaataagtaaggagcaagaccacattataataattcccagaggcctatctttttctgaagctacagcctccaatttggtgaaagtcaatataataggagaagtggttgaccagggaagtaccaatttgaaaattgaccatacaggattcagtccccatgctgcaatctattcaacacgtcctgatgttaagtgtgtcatacacatccatacccttgcaacagcagctgtatcctccatgaaatgtgggatccttccaatttctcaagagtctcttcttctgggagatgttgcctattatgactaccaagggtcacttgaagaacaggaggagagaattcaactgcagaaggttctgggaccaagttgtaaggtgctggtactcaggaatcatggtgtggttgcacttggagaaacattagaggaggcttttcattatatttttaatgtgcaactagcctgtgagattcaggtgcaggccctagcaggtgcaggtggagtagacaatctccatgtactggactttcagaagtataaagctttcacttacactgtagcagcgtctggtggaggaggtgtgaatatgggttcccatcaaaaatggaaggttggcgaaattgagtttgaagggcttatgaggactctggacaacttggggtatagaacaggctatgcttacaggcatcctctcattcgagagaagcctaggcacaagagtgatgtggaaatcccagcaactgtgactgctttttcctttgaagacgatacagtgccactctctcctctcaaatacatggcacagaggcaacagcgtgaaaaaacaagatggctgaactcaccaaatacttacatgaaagtgaatgtgcctgaggagtctcggaacggagaaaccagtccccgaaccaaaatcacgtggatgaaagcagaagactcatctaaagttagtggtggaacacctatcaaaattgaagatccaaatcagtttgttcctttaaacacaaacccgaatgaggtactagaaaagagaaataagattcgggaacaaaatcgatatgacttgaaaacagcaggaccacaatctcagttgcttgctggaattgttgtggataagccaccttctactatgcaatttgaagatgatgatcatggcccaccagctcctcctaacccatttagtcatctcacagaaggagaacttgaagagtataagaggacaatcgaacgtaaacaacaaggcctagaagatgctgagcaggaattactctcagatgacgcttcatctgtttcacaaattcagtctcaaactcagtcaccgcaaaatgtccctgaaaaattagaagaaaaccatgagctgttttccaagagcttcatctccatggaagtgcctgtcatggtagtaaatggcaaggatgatatgcatgatgttgaagatgagcttgctaagcgagtgagtaggttaagcacaagtacaaccatagaaaacatcgagattactattaagtctccagagaaaatcgaagaagtcctgtcacctgaaggctccccttcaaaatcgccatccaagaaaaagaagaaattccgcactccttcttttctgaaaaagaacaaaaaaaaggagaaagttgaggcctaaataaagtctttttataattattattataacaatgtgacattgcacatctaaataccacatttaagttgatcattaatatgcaatggtagatcagattgggggatgtagcaaactggactttaagaactggaaagaggttttacaaaagaaaaactttcagattcatctctcattttatatgtccagaaatggctttgaattttaagcaattactagttttaattagctctgccctcatgaagtattattataattcaccataaacagctatctgtctgaattacttcaggccttctccataatatctgttagaaagaaattgccagtgagcaagtgagaatttttatttctcaatacctgcttcacttgataatcatattataattttttatcatgattattgactatatttttggagtcccattgtttcagtgggcattaacagaatgctttaaaaacttctaagacaagaatctatagcattagtatacactggcacataattttttaaaaagttttaagaaaagattcatttggaattttattcacagtataaaatttcctcacctgaagtaactttgtttgccaaaaaagttgttttaataaactataatttttgaaaacttccttttttattagtttagaaagccccttatttttcaacaaaggggattttgtacacataacatgggttatttagtttaactctggc

SEQ ID NO: 133 - protein, 473 aa, Homo sapiens
MGRKKIQITRIMDERNRQVTFTKRKFGLMKKAYELSVLCDCEIALIIFNSTNKLFQYASTDMDKVLLKYTEYNEPHESRTNSDIVETLRKKGLNGCDSPDPDADDSVGHSPESEDKYRKINEDIDLMISRQRLCAVPPPNFEMPVSIPVSSHNSLVYSNPVSSLGNPNLLPLAHPSLQRNSMSPGVTHRPPSAGNTGGLMGGDLTSGAGTSAGNGYGNPRNSPGLLVSPGNLNKNMQAKSPPPMNLGMNNRKPDLRVLIPPGSKNTMPSVSEDVDLLLNQRINNSQSAQSLATPVVSVATPTLPGQGMGGYPSAISTTYGTEYSLSSADLSSLSGFNTASALHLGSVTGWQQQHLHNMPPSALSQLGACTSTHLSQSSNLSLPSTQSLNIKSEPVSPPRDRTTTPSRYPQHTRHEAGRSPVDSLSSCSSSYDGSDREDHRNEFHSPIGLTRPSPDERESPSVKRMRLSEGWAT

SEQ ID NO: 134 - DNA, 4077 bp, Homo sapiens
gaattcccagctctctgctcgctctgctcgcagtcacagacacttgagcacacgcgtacacccagacatcttcgggctgctattggattgactttgaaggttctgtgtgggtcgccgtggctgcatgtttgaatcaggtggagaagcacttcaacgctggacgaagtaaagattattgttgttattttttttttctctctctctctctcttaagaaaggaaaatatcccaaggactaatctgatcgggtcttccttcatcaggaacgaatgcaggaatttgggaactgagctgtgcaagtgctgaagaaggagatttgtttggaggaaacaggaaagagaaagaaaaggaaggaaaaaatacataatttcagggacgagagagagaagaaaaacggggactatggggagaaaaaagattcagattacgaggattatggatgaacgtaacagacaggtgacatttacaaagaggaaatttgggttgatgaagaaggcttatgagctgagcgtgctgtgtgactgtgagattgcgctgatcatcttcaacagcaccaacaagctgttccagtatgccagcaccgacatggacaaagtgcttctcaagtacacggagtacaacgagccgcatgagagccggacaaactcagacatcgtggagacgttgagaaagaagggccttaatggctgtgacagcccagaccccgatgcggacgattccgtaggtcacagccctgagtctgaggacaagtacaggaaaattaacgaagatattgatctaatgatcagcaggcaaagattgtgtgctgttccacctcccaacttcgagatgccagtctccatcccagtgtccagccacaacagtttggtgtacagcaaccctgtcagctcactgggaaaccccaacctattgccactggctcacccttctctgcagaggaatagtatgtctcctggtgtaacacatcgacctccaagtgcaggtaacacaggtggtctgatgggtggagacctcacgtctggtgcaggcaccagtgcagggaacgggtatggcaatccccgaaactcaccaggtctgctggtctcacctggtaacttgaacaagaatatgcaagcaaaatctcctcccccaatgaatttaggaatgaataaccgtaaaccagatctccgagttcttattccaccaggcagcaagaatacgatgccatcagtgtctgaggatgtcgacctgcttttgaatcaaaggataaataactcccagtcggctcagtcattggctaccccagtggtttccgtagcaactcctactttaccaggacaaggaatgggaggatatccatcagccatttcaacaacatatggtaccgagtactctctgagtagtgcagacctgtcatctctgtctgggtttaacaccgccagcgctcttcaccttggttcagtaactggctggcaacagcaacacctacataacatgccaccatctgccctcagtcagttgggagcttgcactagcactcatttatctcagagttcaaatctctccctgccttctactcaaagcctcaacatcaagtcagaacctgtttctcctcctagagaccgtaccaccaccccttcgagatacccacaacacacgcgccacgaggcggggagatctcctgttgacagcttgagcagctgtagcagttcgtacgacgggagcgaccgagaggatcaccggaacgaattccactcccccattggactcaccagaccttcgccggacgaaagggaaagtccctcagtcaagcgcatgcgactttctgaaggatgggcaacatgatcagattattacttactagtttttttttttttcttgcagtgtgtgtgtgtgctataccttaatggggaaggggggtcgatatgcattatatgtgccgtgtgtggaaaaaaaaaaagtcaggtactctgttttgtaaaagtacttttaaattgcctcagtgatacagtataaagataaacagaaatgctgagataagcttagcacttgagttgtacaacagaacacttgtacaaaatagattttaaggctaacttcttttcactgttgtgctcctttgcaaaatgtatgttacaatagatagtgtcatgttgcaggttcaacgttatttacatgtaaatagacaaaaggaaacatttgccaaaagcggcagatctttactgaaagagagagcagctgttatgcaacatatagaaaaatgtatagatgcttggacagacccggtaatgggtggccattggtaaatgttaggaacacaccaggtcacctgacatcccaagaatgctcacaaacctgcaggcatatcattggcgtatggcactcattaaaaaggatcagagaccattaaaagaggaccatacctattaaaaaaaaatgtggagttggagggctaacatatttaattaaataaataaataaatctgggtctgcatctcttattaaataaaaatataaaaatatgtacattacattttgcttattttcatataaaaggtaagacagagtttgcaaagcatttgtggctttttgtagtttacttaagccaaaatgtgtttttttccccttgatagcttcgctaatattttaaacagtcctgtaaaaaaccaaaaaggactttttgtatagaaagcactaccctaagccatgaagaactccatgctttgctaaccaagataactgttttctctttgtagaagttttgtttttgaaatgtgtatttctaattatataaaatattaagaatcttttaaaaaaatctgtgaaattaacatgcttgtgtatagctttctaatatatataatattatggtaatagcagaagttttgttatcttaatagcgggaggggggtatatttgtgcagttgcacatttgagtaactattttctttctgttttcttttactctgcttacattttataagtttaaggtcagctgtcaaaaggataacctgtggggttagaacatatcacattgcaacaccctaaattgtttttaatacattagcaatctattgggtcaactgacatccattgtatatactagtttctttcatgctatttttattttgttttttgcatttttatcaaatgcagggcccctttctgatctcaccatttcaccatgcatcttggaattcagtaagtgcatatcctaacttgcccatattctaaatcatctggttggttttcagcctagaatttgatacgctttttagaaatatgcccagaatagaaaagctatgttggggcacatgtcctgcaaatatggccctagaaacaagtgatatggaatttacttggtgaataagttataaattcccacagaagaaaaatgtgaaagactgggtgctagacaagaaggaagcaggtaaagggatagttgctttgtcatccgtttttaattattttaactgacccttgacaatcttgtcagcaatataggactgttgaacaatcccggtgtgtcaggacccccaaatgtcacttctgcataaagcatgtatgtcatctattttttcttcaataaagagatttaatagccatttcaagaaatcccataaagaacctctctatgtccctttttttaatttaaaaaaatgactcttgtctaatattcgtctataagggattaattttcagaccctttaataagtgagtgccataagaaagtcaatatatattgtttaaaagatatttcagtctaggaaagattttccttctcttggaatgtgaagatctgtcgattcatctccaatcatatgcattgacatacacagcaaagaagatataggcagtaatatcaacactgctatatcatgtgtaggacatttcttatccattttttctcttttacttgcatagttgctatgtgtttctcattgtaaaaggctgccgctgggtggcagaagccaagagaccttattaactaggctatatttttcttaacttgatctgaaatccacaattagaccacaatgcacctttggttgtatccataaaggatgctagcctgccttgtactaatgttttatatatt

SEQ ID NO: 135 - protein, 506 aa, Homo sapiens
MVVGSDGRYFSRTAIEIVVQMAAANGIGRLIIGQNGILSTPAVSCIIRKIKAAGGIILTASHCPGGPGGEFGVKFNVANGGPAPDVVSDKIYQISKTIEEYAICPDLRIDLSRLGRQEFDLENKFKPFRVEIVDPVDIYLNLLRTIFDFHAIKGLLTGPSQLKIRIDAMHGVMGPYVRKVLCDELGAPANSAINCVPLEDFGGQHPDPNLTYATTLLEAMKGGEYGFGAAFDADGDRYMILGQNGFFVSPSDSLAIIAANLSCIPYFRQMGVRGFGRSMPTSMALDRVAKSMKVPVYETPAGWRFFSNLMDSGRCNLCGEESFGTGSDHLREKDGLWAVLVWLSIIAARKQSVEEIVRDHWAKFGRHYYCRFDYEGLDPKTTYYIMRDLEALVTDKSFIGQQFAVGSHVYSVAKTDSFEYVDPVDGTVTKKQGLRIIFSDASRLIFRLSSSSGVRATLRLYAESYERDPSGHDQEPQAVLSPLIAIALKISQIHERTGRRGPTVIT

SEQ ID NO: 136 - DNA, 1521 bp, Homo sapiens
atggtggtgggcagcgacggcaggtactttagcaggacggccatcgagatcgtggtgcagatggccgcggccaacgggattggacgactgattattggacagaatggcatcttgtcgacacctgcggtctcctgcattatcaggaagatcaaggcagctggtggaatcattctaacagccagccactgccctggaggaccagggggagagtttggagtgaagtttaatgttgccaatggaggtcctgcacccgatgttgtctcagacaaaatctaccaaatcagcaaaacgattgaggaatatgctatatgtcctgatctccgaatcgacctatctcgactaggaagacaagaatttgacctagaaaacaaattcaaaccattcagagtggagatagtggacccagtggatatctatcttaacctccttcggaccatctttgactttcatgccatcaagggtttgctgactggacccagccaactgaagattcgcattgacgcaatgcacggagttatgggaccttatgtgagaaaagttctgtgtgatgagctgggggccccagccaattctgcaataaactgtgttcccctggaagactttggagggcagcaccctgacccaaacctgacatatgcaacgactcttctggaagcaatgaaaggaggagaatatggatttggagctgcatttgatgctgatggggaccgttatatgatcctaggccaaaatggcttctttgtgagcccttctgactccctggccatcattgctgccaacctctcttgcattccatatttccgtcagatgggggtccgcgggtttgggaggagtatgccaaccagcatggccctggacagagtggccaaatcaatgaaggtccctgtatatgagaccccagctggatggagattcttctcaaatctgatggactcaggacgttgcaatctgtgtggggaagagagctttggcactggctctgaccacctccgagagaaggatggcctgtgggctgtcttggtctggctctccattattgctgcccggaagcagagtgtggaggaaattgtccgagatcactgggccaaatttggccgccactactattgcaggtttgactatgaggggttggatcccaagacgacatattatatcatgagggacctggaggccctggtcacagacaaatccttcattggccagcagtttgctgtggggagccatgtctacagcgtggcgaagacggatagttttgaatacgtggaccctgtggatggcactgtgaccaagaaacagggcctaaggatcattttctcggatgcatcacggctcatcttccggctcagttcctccagtggtgtgcgggccaccctcagactgtacgcagagagctacgagagggatcccagcggccatgaccaggagccacaggcagtgctgagccctctcatagccatcgcactgaaaatatcccagattcatgagagaactggccggaggggacccactgtcatcacctga

SEQ ID NO: 137 - protein, 296 aa, Homo sapiens
MSKEVWLNMLKKESRYVHDKHFEVLHSDLEPQMRSILLDWLLEVCEVYTLHRETFYLAQDFFDRFMLTQKDINKNMLQLIGITSLFIASKLEEIYAPKLQEFAYVTDGACSEEDILRMELIILKALKWELCPVTIISWLNLFLQVDALKDAPKVLLPQYSQETFIQIAQLLDLCILAIDSLEFQYRILTAAALCHFTSIEVVKKASGLEWDSISECVDWMVPFVNVVKSTSPVKLKTFKKIPMEDRHNIQTHTNYLAMLEEVNYINTFRKGGQLSPVCNGGIMTPPKSTEKPPGKH

SEQ ID NO: 138 - DNA, 2536 bp, Homo sapiens
agcgggtgcggggcgggaccggcccggcctatatattgggttggcgccggcgccagctgagccgagcggtagctggtctggcgaggttttatacacctgaaagaagagaatgtcaagacgaagtagccgtttacaagctaagcagcagccccagcccagccagacggaatccccccaagaagcccagataatccaggccaagaagaggaaaactacccaggatgtcaaaagaagtctggctaaacatgttaaaaaaggagagcagatatgttcatgacaaacattttgaagttctgcattctgacttggaaccacagatgaggtccatacttctagactggcttttagaggtatgtgaagtatacacacttcatagggaaacattttatcttgcacaagacttttttgatagatttatgttgacacaaaaggatataaataaaaatatgcttcaactcattggaattacctcattattcattgcttccaaacttgaggaaatctatgctcctaaactccaagagtttgcttacgtcactgatggtgcttgcagtgaagaggatatcttaaggatggaactcattatattaaaggctttaaaatgggaactttgtcctgtaacaatcatctcctggctaaatctctttctccaagttgatgctcttaaagatgctcctaaagttcttctacctcagtattctcaggaaacattcattcaaatagctcagcttttagatctgtgtattctagccattgattcattagagttccagtacagaatactgactgctgctgccttgtgccattttacctccattgaagtggttaagaaagcctcaggtttggagtgggacagtatttcagaatgtgtagattggatggtaccttttgtcaatgtagtaaaaagtactagtccagtgaagctgaagacttttaagaagattcctatggaagacagacataatatccagacacatacaaactatttggctatgctggaggaagtaaattacataaacaccttcagaaaagggggacagttgtcaccagtgtgcaatggaggcattatgacaccaccgaagagcactgaaaaaccaccaggaaaacactaaagaagataactaagcaaacaagttggaattcaccaagattgggtagaactggtatcactgaactactaaagttttacagaaagtagtgctgtgattgattgccctagccaattcacaagttacactgccattctgattttaaaacttacaattggcactaaagaatacatttaattatttcctatgttagctgttaaagaaacagcaggacttgtttacaaagatgtcttcattcccaaggttactggatagaagccaaccacagtctataccatagcaatgtttttcctttaatccagtgttactgtgtttatcttgataaactaggaattttgtcactggagttttggactggataagtgctaccttaaagggtatactaagtgatacagtactttgaatctagttgttagattctcaaaattcctacactcttgactagtgcaatttggttcttgaaaattaaatttaaacttgtttacaaaggtttagttttgtaataaggtgactaatttatctatagctgctatagcaagctattataaaacttgaatttctacaaatggtgaaatttaatgttttttaaactagtttatttgccttgccataacacattttttaactaataaggcttagatgaacatggtgttcaacctgtgctctaaacagtgggagtaccaaagaaattataaacaagataaatgctgtggctccttcctaactggggctttcttgacatgtaggttgcttggtaataacctttttgtatatcacaatttgggtgaaaaacttaagtaccctttcaaactatttatatgaggaagtcactttactactctaagatatccctaaggaatttttttttttaatttagtgtgactaaggctttatttatgtttgtgaaactgttaaggtcctttctaaattcctccattgtgagataaggacagtgtcaaagtgataaagcttaacacttgacctaaacttctattttcttaaggaagaagagtattaaatatatactgactcctagaaatctatttattaaaaaaagacatgaaaacttgctgtacataggctagctatttctaaatattttaaattagcttttctaaaaaaaaaatccagcctcataaagtagattagaaaactagattgctagtttattttgttatcagatatgtgaatctcttctccctttgaagaaactatacatttattgttacggtatgaagtcttctgtatagtttgtttttaaactaatatttgtttcagtattttgtctgaaaagaaaacaccactaattgtgtacatatgtattatataaacttaaccttttaatactgtttatttttagcccattgtttaaaaaataaaagttaaaaaaatttaactgcttaaaagtaaaaaaaaaaaaaaaaaaa

SEQ ID NO: 139 - protein, 177 aa, Homo sapiens
MFHVSFRYIFGLPPLILVLLPVASSDCDIEGKDGKQYESVLMVSIDQLLDSMKEIGSNCLNNEFNFFKRHICDANKEGMFLFRAARKLRQFLKMNSTGDFDLHLLKVSEGTTILLNCTGQVKGRKPAALGEAQPTKSLEENKSLKEQKKLNDLCFLKRLLQEIKTCWNKILMGTKEH

SEQ ID NO: 140 - DNA, 1672 bp, Homo sapiens
tttaaaactctattctctaggaagaaaataaatctttaaaggaacagaaaaaactgaatgacttgtgtttcctaaagagactattacaagagataaaaacttgttggaataaaattttgatgggcactaaagaacactgaaaaatatggagtggcaatatagaaacacgaactttagctgcatcctccaagaatctatctgcttatgcagtttttcagagtggaatgcttcctagaagttactgaatgcaccatggtcaaaacggattagggcatttgagaaatgcatattgtattactagaagatgaatacaaacaatggaaactgaatgctccagtcaacaaactatttcttatatatgtgaacatttatcaatcagtataattctgtactgatttttgtaagacaatccatgtaaggtatcagttgcaataatacttctcaaacctgtttaaatatttcaagacattaaatctatgaagtatataatggtttcaaagattcaaaattgacattgctttactgtcaaaataattttatggctcactatgaatctattatactgtattaagagtgaaaattgtcttcttctgtgctggagatgttttagagttaacaatgatatatggataatgccggtgagaataagagagtcataaaccttaagtaagcaacagcataacaaggtccaagatacctaaaagagatttcaagagatttaattaatcatgaatgtgtaacacagtgccttcaataaatggtatagcaaatgttttgacatgaaaaaaggacaatttcaaaaaaataaaataaaataaaaataaattcacctagtctaaggatgctaaaccttagtactgagttacattgtcatttatatagattataactgtctaaataagtttgcaatttgggagatatatttttaagataataatatatgtttaccttttaattaatgaaatatctgtatttaattttgacactatatctgtatataaaatattttcatacagcattacaaattgcttactttggaatacatttctcctttgataaaataaatgagctatgtattaacactgccagattcagttaataaatctcaacagaatttttaaggtgagatttttaatacttcactgctctttaattttctactttcattgaatatatgacctttaatagcctattaccaacaatgaatatgagacattaccttctatgttaaattttagtcttttaaaagaaacttgtctggaaatgtctgcagtcttcattcactgataaagggaaatggaaacactattctaagcaggccagaatctacaaatagctgtcagtttgcattgcactgaactcacatccttcatgctctctcagcctcatcaccatctagttatgtgctgatgggctttatttgatctacagaagatgctctggtgacaccctcagtgtgtgttggtaacaccttcctgccttctctcactttccttgacccatatgacatttcaccttcactggtgcgatagctgtatagaattgtatacacttccatacaatttactgaactgccccattaacaggactttgagtcaagtatttttttctgtttggttatcactgttaactccagaaagatgagttgactaacattttttagaagcaaatg

SEQ ID NO: 141 - DNA, 1885 bp, Homo sapiens
gctgaagaaaaaggatgaagctgatctgttgaaacaactactttcccaactcggaggcaaaaggggctgatagaagataacattcacctaccatttcatcttgtgacccccagagatcacgtttgcgtgttctggctgagttttttattattgtttgttttaaatgattaaataatacacaattaaatgtcaggatagcatctcttgcaaagtgaccagtgcagcagaattgtctttctatccatatttgagcttagagaaacatttcccatgtcctaagttcttagaagcaattactttagcgttggggagcattgttctaccagacccatttatgcaggggagatgaagcttaaaagacgggatgtggggtgggagtgtgtttcttaagccgaagctgttgcaggctgggggatttttgcattttctttttgttttgtttttgactgcagattctgtacatctgtctgtgggaggagagttgctactcaggacaggatttaagagacacattccagtgacctttaagaatctgcatggcgggaggtccttctccaggagtgtgggttggtccactctgggacccaccacactaagaagggggagatgataaaataacattaaaggaagaatggcctccagcctgcaggttttgttggaaagaaataaaaagggagtcattaagaccataaattcagattgaggcctcttgaaaaggttgatgtgggctagcaacctgcctgtcgaaacagtccttggttcatcagcagtgtgggaaggcagccaaggctcctgcagattcctggcatcgaccttggaaagcctctgcgatacttgtgtgtacgaatacagcagaggacagggaggtccttgttctgtggtctctgtttagtgactgaaacttaaacccaaaggcaagcccagattgtctggccgttcatccccatgctttgataggggttaggaggaaccctttccgtatgaaagacaggccctactagggcttacaaccaagccaaaggaccatctcttctttcttccacctcccttcacccctgccccgcagcagagccgagatgtgagacattcattgtcacggagcaaggagacaaaggcaagttcaagttgagaagcatatggcagcaaacagaaatgaaaaccatatgtcccagcaaggggaaaagcagtcatttccagattataaaaatcaatgaagtactctccacctaggtcagctgaaattcgagccctcacagtcaggcctgtcagagaagttaagcagaaacatctcggggggacttctaaaatttagtgaagacaaggccttgcaactccaaagaaactttttttcccccccttgaaacagggtcttgctctgttgcccagcctggagtgcagtggtgcagtcacggctcactgcagcctcaagctcctgggctcaagcactatccccacctcaacctccttagtagctgggactacaggtgcacaccaccatgcccagctaaccacagaaactttcatctcttcattttttctttgggcaccattaatacctaagacaggtagaaagggtcccagaaagacaccattggtaatggccgattgccggctgcagtcatcgcccccagatcaggctggtacaggatgccttaaggtgatgagaggtgagggtgcatgaagaataatgagcacagggaagagagaagcaggacaaagtagcagataaaatgccggcaaagcacagatgaatgtcttcaagaagctcttgtatttctctgcacagtgtaaatatccttgctatttcaggatggcggctggcctgctcagtaacatacatgttccaaataaagattttgcatgaaagtaaaaaaaaaaaaaaaaa

SEQ ID NO: 142 - protein, 475 aa, Homo sapiens
MVDTEMPFWPTNFGISSVDLSVMEDHSHSFDIKPFTTVDFSSISTPHYEDIPFTRTDPVVADYKYDLKLQEYQSAIKVEPASPPYYSEKTQLYNKPHEEPSNSLMAIECRVCGDKASGFHYGVHACEGCKGFFRRTIRLKLIYDRCDLNCRIHKKSRNKCQYCRFQKCLAVGMSHNAIRFGRMPQAEKEKLLAEISSDIDQLNPESADLRALAKHLYDSYIKSFPLTKAKARAILTGKTTDKSPFVIYDMNSLMMGEDKIKFKHITPLQEQSKEVAIRIFQGCQFRSVEAVQEITEYAKSIPGFVNLDLNDQVTLLKYGVHEIIYTMLASLMNKDGVLISEGQGFMTREFLKSLRKPFGDFMEPKFEFAVKFNALELDDSDLAIFIAVIILSGDRPGLLNVKPIEDIQDNLLQALELQLKLNHPESSQLFAKLLQKMTDLRQIVTEHVQLLQVIKKTETDMSLHPLLQEIYKDLY

SEQ ID NO: 143 - DNA, 1735 bp, Homo sapiens
cactcggagcccgagcccgagccgcagccgccgcctggggcgcttgggtcggcctcgaggacaccggagaggggcgccacgccgccgtggccgcagaaatgaccatggttgacacagagatgccattctggcccaccaactttgggatcagctccgtggatctctccgtaatggaagaccactcccactcctttgatatcaagcccttcactactgttgacttctccagcatttctactccacattacgaagacattccattcacaagaacagatccagtggttgcagattacaagtatgacctgaaacttcaagagtaccaaagtgcaatcaaagtggagcctgcatctccaccttattattctgagaagactcagctctacaataagcctcatgaagagccttccaactccctcatggcaattgaatgtcgtgtctgtggagataaagcttctggatttcactatggagttcatgcttgtgaaggatgcaagggtttcttccggagaacaatcagattgaagcttatctatgacagatgtgatcttaactgtcggatccacaaaaaaagtagaaataaatgtcagtactgtcggtttcagaaatgccttgcagtggggatgtctcataatgccatcaggtttgggcggatgccacaggccgagaaggagaagctgttggcggagatctccagtgatatcgaccagctgaatccagagtccgctgacctccgggccctggcaaaacatttgtatgactcatacataaagtccttcccgctgaccaaagcaaaggcgagggcgatcttgacaggaaagacaacagacaaatcaccattcgttatctatgacatgaattccttaatgatgggagaagataaaatcaagttcaaacacatcacccccctgcaggagcagagcaaagaggtggccatccgcatctttcagggctgccagtttcgctccgtggaggctgtgcaggagatcacagagtatgccaaaagcattcctggttttgtaaatcttgacttgaacgaccaagtaactctcctcaaatatggagtccacgagatcatttacacaatgctggcctccttgatgaataaagatggggttctcatatccgagggccaaggcttcatgacaagggagtttctaaagagcctgcgaaagccttttggtgactttatggagcccaagtttgagtttgctgtgaagttcaatgcactggaattagatgacagcgacttggcaatatttattgctgtcattattctcagtggagaccgcccaggtttgctgaatgtgaagcccattgaagacattcaagacaacctgctacaagccctggagctccagctgaagctgaaccaccctgagtcctcacagctgtttgccaagctgctccagaaaatgacagacctcagacagattgtcacggaacacgtgcagctactgcaggtgatcaagaagacggagacagacatgagtcttcacccgctcctgcaggagatctacaaggacttgtactagcagagagtcctgagccactgccaacatttcccttcttccagttgcactattctgagggaaaatctgacacctaagaaatttactgtgaaaaagcattttaaaaagaaaaggttttagaatatgatctattttatgcatattgtttataaagacacatttacaatttacttttaatattaaaaattaccatattatgaaattgc

SEQ ID NO: 144 - protein, 132 aa, Homo sapiens
MCDAFVGTWKLVSSENFDDYMKEVGVGFATRKVAGMAKPNMIISVNGDVITIKSESTFKNTEISFILGQEFDEVTADDRKVKSTITLDGGVLVHVQKWDGKSTTIKRKREDDKLVVECVMKGVTSTRVYERA

SEQ ID NO: 145 - DNA, 619 bp, Homo sapiens
tgcagcttccttctcaccttgaagaataatcctagaaaactcacaaaatgtgtgatgcttttgtaggtacctggaaacttgtctccagtgaaaactttgatgattatatgaaagaagtaggagtgggctttgccaccaggaaagtggctggcatggccaaacctaacatgatcatcagtgtgaatggggatgtgatcaccattaaatctgaaagtacctttaaaaatactgagatttccttcatactgggccaggaatttgacgaagtcactgcagatgacaggaaagtcaagagcaccataaccttagatgggggtgtcctggtacatgtgcagaaatgggatggaaaatcaaccaccataaagagaaaacgagaggatgataaactggtggtggaatgcgtcatgaaaggcgtcacttccacgagagtttatgagagagcataagccaagggacgttgacctggactgaagttcgcattgaactctacaacattctgtgggatatattgttcaaaaagatattgttgttttccctgatttagcaagcaagtaattttctcccaagctgattttattcaatatggttacgttggttaaataactttttttagatttag

SEQ ID NO: 146 - protein, 592 aa, Homo sapiens
MPSRTDPKMEGSGGRVRLKAHYGGDIFITSVDAATTFEELCEEVRDMCRLHQQHPLTLKWVDSEGDPCTVSSQMELEEAFRLARQCRDEGLIIHVFPSTPEQPGLPCPGEDKSIYRRGARRWRKLYRANGHLFQAKRFNRRAYCGQCSERIWGLARQGYRCINCKLLVHKRCHGLVPLTCRKHMDSVMPSQEPPVDDKNEDADLPSEETDGIAYISSSRKHDSIKDDSEDLKPVIDGMDGIKISQGLGLQDFDLIRVIGRGSYAKVLLVRLKKNDQIYAMKVVKKELVHDDEDIDWVQTEKHVFEQASSNPFLVGLHSCFQTTSRLFLVIEYVNGGDLMFHMQRQRKLPEEHARFYAAEICIALNFLHERGIIYRDLKLDNVLLDADGHIKLTDYGMCKEGLGPGDTTSTFCGTPNYIAPEILRGEEYGFSVDWWALGVLMFEMMAGRSPFDIITDNPDMNTEDYLFQVILEKPIRIPRFLSVKASHVLKGFLNKDPKERLGCRPQTGFSDIKSHAFFRSIDWDLLEKKQALPPFQPQITDDYGLDNFDTQFTSEPVQLTPDDEDAIKRIDQSEFEGFEYINPLLLSTEESV

SEQ ID NO: 147 - DNA, 2164 bp, Homo sapiens
atgcccagcaggaccgaccccaagatggaagggagcggcggccgcgtccgcctcaaggcgcattacgggggggacatcttcatcaccagcgtggacgccgccacgaccttcgaggagctctgtgaggaagtgagagacatgtgtcgtctgcaccagcagcacccgctcaccctcaagtgggtggacagcgaaggtgacccttgcacggtgtcctcccagatggagctggaagaggctttccgcctggcccgtcagtgcagggatgaaggcctcatcattcatgttttcccgagcacccctgagcagcctggcctgccatgtccgggagaagacaaatctatctaccgccggggagccagaagatggaggaagctgtaccgtgccaacggccacctcttccaagccaagcgctttaacaggagagcgtactgcggtcagtgcagcgagaggatatggggcctcgcgaggcaaggctacaggtgcatcaactgcaaactgctggtccataagcgctgccacggcctcgtcccgctgacctgcaggaagcatatggattctgtcatgccttcccaagagcctccagtagacgacaagaacgaggacgccgaccttccttccgaggagacagatggaattgcttacatttcctcatcccggaagcatgacagcattaaagacgactcggaggaccttaagccagttatcgatgggatggatggaatcaaaatctctcaggggcttgggctgcaggactttgacctaatcagagtcatcgggcgcgggagctacgccaaggttctcctggtgcggttgaagaagaatgaccaaatttacgccatgaaagtggtgaagaaagagctggtgcatgatgacgaggatattgactgggtacagacagagaagcacgtgtttgagcaggcatccagcaaccccttcctggtcggattacactcctgcttccagacgacaagtcggttgttcctggtcattgagtacgtcaacggcggggacctgatgttccacatgcagaggcagaggaagctccctgaggagcacgccaggttctacgcggccgagatctgcatcgccctcaacttcctgcacgagagggggatcatctacagggacctgaagctggacaacgtcctcctggatgcggacgggcacatcaagctcacagactacggcatgtgcaaggaaggcctgggccctggtgacacaacgagcactttctgcggaaccccgaattacatcgcccccgaaatcctgcggggagaggagtacgggttcagcgtggactggtgggcgctgggagtcctcatgtttgagatgatggccgggcgctccccgttcgacatcatcaccgacaacccggacatgaacacagaggactaccttttccaagtgatcctggagaagcccatccggatcccccggttcctgtccgtcaaagcctcccatgttttaaaaggatttttaaataaggaccccaaagagaggctcggctgccggccacagactggattttctgacatcaagtcccacgcgttcttccgcagcatagactgggacttgctggagaagaagcaggcgctccctccattccagccacagatcacagacgactacggtctggacaactttgacacacagttcaccagcgagcccgtgcagctgaccccagacgatgaggatgccataaagaggatcgaccagtcagagttcgaaggctttgagtatatcaacccattattgctgtccaccgaggagtcggtgtgaggccgcgtgcgtctctgtcgtggacacgcgtgattgaccctttaactgtatccttaaccaccgcatatgcatgccaggctgggcacggctccgagggcggccagggacagacgcttgcgccgagaccgcagagggaagcgtcagcgggcgctgctgggagcagaacagtccctcacacctggcccggcaggcagcttcgtgctggaggaacttgctgctgtgcctgcgtcgcggcggatccgcggggaccctgccgagggggctgtcatgcggtttccaaggtgcacattttccacggaaacagaactcgatgcactgacctgctccgccaggaaagtgagcgtgtagcgtcctgaggaataaaatgttccgatgaaaaaaaaaa

SEQ ID NO: 148 - protein, 365 aa, Homo sapiens
MALLLCFVLLCGVVDFARSLSITTPEEMIEKAKGETAYLPCKFTLSPEDQGPLDIEWLISPADNQKVDQVIILYSGDKIYDDYYPDLKGRVHFTSNDLKSGDASINVTNLQLSDIGTYQCKVKKAPGVANKKIHLVVLVKPSGARCYVDGSEEIGSDFKIKCEPKEGSLPLQYEWQKLSDSQKMPTSWLAEMTSSVISVKNASSEYSGTYSCTVRNRVGSDQCLLRLNVVPPSNKAGLIAGAIIGTLLALALIGLIIFCCRKKRREEKYEKEVHHDIREDVPPPKSRTSTARSYIGSNHSSLGSMSPSNMEGYSKTQYNQVPSEDFERTPQSPTLPPAKVAAPNLSRMGAIPVMIPAQSKDGSIV

SEQ ID NO: 149 - DNA, 2537 bp, Homo sapiens
cgccgccgcgagccagtcgggagcgcgcgaggcgcggggagcctgggaccaggagcgagagccgcctacctgcagccgccgcccacggcacggcagccaccatggcgctcctgctgtgcttcgtgctcctgtgcggagtagtggatttcgccagaagtttgagtatcactactcctgaagagatgattgaaaaagccaaaggggaaactgcctatctgccgtgcaaatttacgcttagtcccgaagaccagggaccgctggacatcgagtggctgatatcaccagctgataatcagaaggtggatcaagtgattattttatattctggagacaaaatttatgatgactactatccagatctgaaaggccgagtacattttacgagtaatgatctcaaatctggtgatgcatcaataaatgtaacgaatttacaactgtcagatattggcacatatcagtgcaaagtgaaaaaagctcctggtgttgcaaataagaagattcatctggtagttcttgttaagccttcaggtgcgagatgttacgttgatggatctgaagaaattggaagtgactttaagataaaatgtgaaccaaaagaaggttcacttccattacagtatgagtggcaaaaattgtctgactcacagaaaatgcccacttcatggttagcagaaatgacttcatctgttatatctgtaaaaaatgcctcttctgagtactctgggacatacagctgtacagtcagaaacagagtgggctctgatcagtgcctgttgcgtctaaacgttgtccctccttcaaataaagctggactaattgcaggagccattataggaactttgcttgctctagcgctcattggtcttatcatcttttgctgtcgtaaaaagcgcagagaagaaaaatatgaaaaggaagttcatcacgatatcagggaagatgtgccacctccaaagagccgtacgtccactgccagaagctacatcggcagtaatcattcatccctggggtccatgtctccttccaacatggaaggatattccaagactcagtataaccaagtaccaagtgaagactttgaacgcactcctcagagtccgactctcccacctgctaaggtagctgcccctaatctaagtcgaatgggtgcgattcctgtgatgattccagcacagagcaaggatgggtctatagtatagagcctccatatgtctcatctgtgctctccgtgttcctttcctttttttgatatatgaaaacctattctggtctaaattgtgttactagcctcaaaatacatcaaaaaataagttaatcaggaactgtacggaatatatttttaaaaatttttgtttggttatatcgaaatagttacaggcactaaagttagtaaagaaaagtttaccatctgaaaaagctggattttctttaagaggttgattataaagttttctaaatttatcagtacctaagtaagatgtagcgctttgaatatgaaatcataggtgaagacatgggtgaacttacttgcataccaagttgatacttgaataaccatctgaaagtggtacttgatcatttttaccattatttttaggatgtgtatttcatttatttatggcccaccagtctcccccaaattagtacagaaatatccatgacaaaattacttacgtatgtttgtacttggttttacagctcctttgaaaactctgtgtttggaatatctctaaaaacatagaaaacactacagtggtttagaaattactaattttacttctaagtcattcataaaccttgtctatgaaatgacttcttaaatatttagttgatagactgctacaggtaatagggacttagcaagctcttttatatgctaaaggagcatctatcagattaagttagaacatttgctgtcagccacatattgagatgacactaggtgcaatagcagggatagattttgttggtgagtagtctcatgccttgagatctgtggtggtcttcaaaatggtggccagccagatcaaggatgtagtatctcatagttcccaggtgatatttttcttattagaaaaatattataactcatttgttgtttgacacttatagattgaaatttcctaatttattctaaattttaagtggttctttggttccagtgctttatgttgttgttgtttttggatggtgttacatattatatgttctagaaacatgtaatcctaaatttaccctcttgaatataatccctggatgatattttttatcataaatgcagaataatcaaatacattttaagcaagttaagtgtcctccatcaattctgtattccagacttgggaggatgtacagttgctgttgtgtgatcaaacatgtctctgtgtagttccagcaaatcaagctgagctttgaaaaagtttgtcttagttttgtgaaggtgatttattcttaaaaaaaaaaaaaaaaaaaaaaaaaaaaaaaaaaaaaaaaaaaaaaaaaaaaaaaaaaaaaaaaaaaaaaaaaaaaaaaaaaaa

SEQ ID NO: 150 - protein, 5738 aa, Homo sapiens [sequence omitted]

SEQ ID NO: 151 - DNA, 128361 bp, Homo sapiens
gatctgaaagcaaggtgccagctgggcctggtgactcaagcctgtaatcctagcactttgggaggctgaggcaggagcattgcttgaggacagaagttcgagaccaacctgggcaacatagcaagcccccatctctacaaaaaaaaattaaaaataaaagcaaggtgcagaagtaaccaaaaccccttgtcaccccatccacctcgtggcagtcctgagacaaggatctaagaaaggaaagtaagtttacatgaaaggataatttggagaatgtccactatttacatgggccctgggtcagtcaacaaagtagaggagagactgctggtccctctgccctcttagccttgttctgtggtttctatcccttcattcctggcagggagcacagaggaatcagagcctcttggggtgctcaaggcggggcaaagacctagggccgggtcttgctgcttgccaaggcccagtggcaattcagggtgacttcctgtcttggcacaggcaggaaaggtgacaccacaaggagttcgactgccacaaggagtcgaacagccctggctgctgttctcccagaggatgcaggggctgcactgctcctaggactgcatagccacccaagtgctccaaatatcgagcatcgtgagcagcaagggaagggccgggctgggtggggacagctgctggagccatggttggtccgccaggcaggggaacagccttccagcagggtcttggtgacactcttattgatcagatccagagccagaccttctgttaggggctagctcaaggccagaaacctgtagctcaggagagcttggctttagatttctagaaataatgggaacagttgccaagtcactaacacagccccaggaaagagcatctccttaaatgttgtgccctggcaccttgctttcctcactctagtctcagctttggctgaaggggtcagaggcaaggttaagggctctctgttgaggggctggtggatctagtcaaagagaggccacttcggtggagtagtgctgagatctgtcagcctgggaagtttggcaggaggccataggcactctgggggctcatactgggctgaaatcctcatgattgggctggagtatgagccccaggagtccaggatcatggagaagatggctttgcttgggatggaggaattgagcagcttcttggacacctcctcaatggatgtctaaaagggttcttcctcctgctgggagaagccaagcttggaggtgggctccaaaaccttgtctggaggtgctgaggccctgagaattgcaggttgggctctttcaggccaggagaaaacaagatctgtttctaccagacctgaatttcctccgtctctccctctgctaaccatcagtatttcaaagactcctgggttggggatgtaaacccagtataggaggtctttgtccttgaaatgagaggctgggacaagtccctctaggactggactgactcctcttggagatctgggatgggaagatgcatctttgcaaggtgggcactccaatttgatggcctctaggagaggcactgcctcccctggctggattcctctaagagaggtttctgcttttgtccagtcccgaagcaggaaaaggggtttctccttcctcagctaggatcacctgggggcttgtgaactctctggcagggatgactgaatctgagctcattagtttatgggtgtagcccccagggaaagttggatcttcactgagggctgcaacaccaaggcctgttcacagggaattaagtgggccaaggtgtgagtgggcatcagggagtccaggttggatgcacagattcctgacaagttctgcagtgggtcatccctgctatttaaatacctggggcaccccccaagtagccactggcattgaagcagatggcccagaagaagaccttgccattggtggatatttcgctaaaaacatattagggaggaggcttggcagatggaatacttccagcctgatgtagaatgagcttcaattaggggaaatgtttctccatccttgtatagatgtcttccagtcacgtgttcccatccatgttgaaggcaaattgaatcatatccagttaggctggggcacctcattattagcgggctctgatcccagggtggttctctgtctccattgcttgctgctgctgctggagcccaacccatcagaactcatctttccaagtcaagagtgaagcacagctgccttgtgtctgcctggaatgggctccagtggtttggaggatgagttctggagagcgagtttggagaataaacttctaggaccgcctgttgctactgtcttttcctttagtggtcaagaacgagacattgttcagactattgccatctttggggacagccattatctgggtgttgggtgggggtgggggtgattaataaccttgattccagttggaaactttcaagggtcagcactgctgcctctcaggagccctgcacccgaccaggatcaggtcaaagccctgagaacagtctgaggtcaaagccctgagaacagtaaggggaggggagcaaccaacattagtgtaaaccccagaatctgagcctgagaacagaagctctgatgtccgagagcaaacgatgacgtcccaactctagaacagagagcaaattcacttttcctctgcctttttgttctagcagggccctcaatggatcggatggcacccactcactttggtgagggcagattttctttcagttgactgattgaaatgccagtctctctcagtaacaccctcacacacacccagaagtggtcttttaccaactatctggacatcccttggcccagtgaagttgacacataaaattacccatcacagaagctcaactcaactagccaagacaaaaggagaaataggccgggcatggtagctcgcacctgtaatcccagcactttgggaggccgaggcaggtggatcacttcaggtcaggagttcaagaccagcctggccaacatggtgaaattccatctctactgaaaatacaaaaaatagccgggtgtggtggtgctgtagtggtggtgcacctgtagtcccagctacttgggaggctgaggcacgagaatcatttgaacccaggaggcagaggttgcagtgagccaagatcatgtaactgcgctccagcctgggtaacagagaaagaccttgtctcaaaaaaaaaaaaaaaaaaaaaaaaagaaagaaaagaaatatactggctcaatgaagtcatgggaatgattgcttcaagaagcaggcagaattacagggataagagatttattgggaagtatagctcccatcagaggtgaaaaagggagaaagcagtctcaggcatgatgagcatccgacccctctgcaaagagagctgggggcggggggaacaggattgtgcagctggagcctcagaccctgatgcacaaagtctcagacaccctgacagagagctctggcccagagagcttattcaccggcttattagacgacttccactttgggtagaaatagcccggcatggtcactggctggggacttcctgggaggagcatggccttggctcacaagctggggtggaccctgggtacactgacagcagccagctgtcagctcaccatcctcttcacagaggagcagcattgggtttggaagggaaatccaagggtgcatctccatggttgccacagaaacaagggatacggtttggcctaaggaatgccaagaatctgaggctcatctgatacaaagaccttcttcgcacctcattcctactttactctgcggtcagctccattctccctcactgaaaaccaatctcattcacatgataagaaatatggcctatggaagcttccatgtgttacttcctacagcttttgttacccaggagggtctgactcacacggtcactggtccaaagttcaaaatcctggggaaggccaactggcccagcttgggctgggttccctctcctggaccaatcacctggtgccagggccaggaccatgcagaaatacagcagctccatctcaccaagcagctccatctcactgttttttagaaaaacagcagcactgactacatacaattagatatctgttccaaatggtctacacatcttgtctccatttcctcactccaattcacccttcagacatttgcagtcgaacttttgccaccatcattctactgaagcagctttctaagtgaccgcccatgagtttatagttaataaatctgatggtcctcttgaactgtcaatataacagttgctgacataggactggctctagctattgtgcccactgcagtagatacttgggcctgactgtccagcctgggggccagcatttccctgggaactcccatttcttccataaacgggtaggacatgacatccataggacaacgatcatagctgaacaaccctgggatcaacttgaccttagcttagctagattctttcttccaggagtctggaattgagaaagttagtcaattgtttgaatgactacaccagtaactggtcaatgtggaagctatggagaggccacctttgctgtgctctatgagtgaagaagcaggaaagctggtccacagagaaggaaggaaggaatgcacagagaagcaggggagaaaatagcgcatctggtgagtaaccctggaagaaagcagttgtgtggggtacacagcagagcagaagctgaagcgtggtcatttagagggtgcattgccctcattagggagtccctaatgaggagccccatacagggagcaagtgacctagaagaactcagcaaaggacctcatgagagacaaagtcactattccagcagcatcctgccacacagaggacacctgggttgggtgacaacaacactggtcagatgggaggcattctccttcccctccttcctgtcatccccctgggggagccaactggggcccagggtgtgaggaagagcagtgaaagaacaagatggagatcactgagacctgggccccttttcccatcacagcagtccccagtgagattggagagatgcttcagagtggatgagatatagaagttgtgggttagatggtgctagactttttagtaactgaaaatgagactattctaacttccaagatatattaggatccaccaaacatatggtccaggagtgggtgtgaccagaacttctcctgcccctgtacactcactaccgtgccatgggtcttggctgctgttcccaccaaagacggttttcccacctcttaaaccttggggggctttgtaacttgatttgatcaagagaatatggctgaagtgacactgtgtgagtgctgcagccatggcttcaggaagcccttacagattctgcaccagcccccttggaatacagagctggcatgtcggaggcccgggtcagcctcctggaggaggagagagaggcctagccaatagctagcaccaaccactggatatgagaataggaccattttggaccacccagatccagttgggccacaagagccacaaggtaactgtacctgcaaggaggaacccaggtgagaccagccaaaaaccactctgctgaacccagtccaaactgctaacccacagaactgtaagcaaataaaaggttgttttaagtggctcaatttcggagtgatttgttacacacaataaaaaagtgatatagcgaagaaggcagatacaacagaatgggtttgaatgcgacgatgaaagaagaaaataaagttgtttcttgccacttcccaagtccagctcatttaatttacaagcaatatttgcaaaaggcagatccgggcagcgatgtgagatttttcccctgggtattctcaagtgcctaaatacctacttggtttaaaatagataattctcagctgggcacagtggctcaggcctgtaatctgagcactttgggaggccaaggcagacagatcacttgaggtcaagaggttgagaccagcctgaccaacatggtaaaatcctgtctctactaaaaatacagaaaaaaaaaattagccaagcgtggtggcaggtgcctgtaatcccagctacccaggaggctgaggcaggagaatcacttgaatccaagaggcagaggctgcagtgagccaagatcgtgccactgtgctccagcttgggcgacagagtgagactctgtctcaaaaaaaaaaaaaacaaaacaacatagataattcttatctctggactctccccttgtcccactctgcaatgtttcccttcggacatctcctcacagagctgtggaaagctcagaaggcccctctctgaagcctgactgctggtcaccagcattggccctcagaaggctgctgccaatcagggctgaggagaagccgtgaccttcactgggaatagaagtgggggcgaggggtgagcaagctctgctttctttcctgaaacagcaaaatgagacaagtgtgtgcacgctgtgctgctgcagctgcgaaatgaaaagcttctcattagcatcctttgcacaggggtaggggtgggggataactcagggacagctctcagagtgcagagctggggcttctgttcccaacccaggcccccggcaggccccctaggtgtgtcatctgcctccagcccagctaggcaagtgtgcttccatctgggttggggagagggatgggtggaagtctcctgtggggtaattgtgagtcctgatctggtcccagaatgtgagcccaccttagttgtgggaccctgggacctccaccctccccagcccgctgagcagggaggggcatgcagagctgggtggaggggaagcaggttcctctggccacacaggctcttcctgtgccaggggcagcccaggcacaagatgacaaggagaaccggaaactagccagcagggcctgccctgcaaaatcatggatttcctctttccctccctcccacccttcaggccccagcagaacctctctcctccaggcctccgttctgtcatgcaggatgagagcagaggttcttaaaccagctctgcggaccatgtgggcccacagaggggcttaaagagggtgtccacataccctctaaaattacgtgcaaatcattgtttctatgcacattactctgaagggagctttaaacaactaaatgcttggtggtttgctaaaggttaggaaccgacagcctagaaaattctcaggcctctccaacactgacattcctgctttcccctttctgtctgctttcctgagtgtggttctcagctctcttcttagttcaggtagctctcttctcatctaatacatatactttgcagtaacggccaacgaaggtggtatattacagtgaggctttaaatgggacatgcagagtatgtgaaacataccagatatctaactcacataattgcatttgagcagtaagtttagctttaaccatctcagcagccacatgaaaaaatagatcgctgaatttattaactttgggatttgtgtttgctgtcaccctgtcttagttcacagctataactctgcaggggtggattttaggcactcagattatccggtaggggagggattttgagatgggtaggccttgtaaaggctcctcttccacctgtacaattcaacatacgtgttgtgagtgttcaaatgtgccaggtcctggaaataccaagacaaaaaaacacgacttccgccctcgagatgttcccagtgggcctggagagatgaggctcctacaagggtgtaacctttctaaaccccggtttccttacctgagaagtgaggacagcaaccccgtaccaaagggggcttaggggaattaagtaggagcctcagtcacaggaggcactcacacattttaggcacacgcggacacacccaacaactgcaggcgacatctggtaaggtgggaagcagaggaaccatgacagcttaaaggaggagattgttgtgtgctgggatcattggggaaggacacccccaggaggtggcccccatctgtgctcgaaaaataggtaggatttaaaagggaagtcagggcagtaggcactttgtgatggggaagcccagggaggccggggcaggaggcaggaaggaccacacggcccggagacaggaacaagaccgcttggtgtaagggagggtgtgtacccaggaggtttggaaaataagtttcaaaagtttgttggggccaactgtagagagccttgagttagaacagacatgtattgcacactggctaggtgggcactctgctctgtgccagggaagcttgccacccccagagggacacacagaataatgtggcacaatgtgtcaaccgctaaggcctctggatattcagatgagcagaagtttctaagctggggcgtaataagttataaggaagatcagcctgacagttggaggatagatggggaagcaggagttggggagaagtcagagggggacctgataggagaaggttgcccactggcctgggcttggggggacagtactgggagggtcaggggcagcaggggcagcagggcaggcatctgcaaaggatgagcgtgctatgacgcgagctccatcattctggagaaagaggatcctgaggccttaggagttctcctggaagccccacagtgaaatctcaagagagaaaatcccagcgaggacagggacactgggcccacgggaatcctgtcttgctgggccggaggggagccctgggtctggctcctgtagagcctgaaatagaatccgatttgcgatgcccctaatgatgttatgtaatgacattgcataagcccgttacgtaaatcaaagtcctgctattgaccaagaatgtcccctgccccaaggctgacctaatcccacgcctgaaggctcagtcctttgtggcagttggataaatctgtttcctaaagcctctgtgaaaccctcccgaccttaaagtctctgtctttagggttcctggggcctccttctccgttgctgcttctccactgtgggaggcctcagtgtgacactcactcatccttccccaggtgagggttcccagggaaggacaggattccagtccttccaccagcgtggaattgtggccgtgcgccctcttctgggggtcttgcatactccctctgactgtgaaatacaagacttgtctctggttaaaagacatttcaaggatcagtaagtgagtgaagaagttttcttccctgtggggcatgggtggcctccccaggaccctggagttaacaactacgagcaggttcttgagtcccaggagcagaaagaatctttcactactggaaaccagcatgtcccgtgaacgcactcaccaacctgtctgccttcagtcggcccatctgtctccctgaacatactagcagaagccctcccaccctcaacccacctcgccaacccccaccccggctccccttcaagccctctccccagcataggcaacatcttcctcgggaggctgtctccttccttcatctatgtctctctacaagtaaatcctggtgtgcacaccaccacccccgacacataaacacagtttacagaaacaccaaacaaaacagtcatgtttgatggaaaaaggctgagttcccagttgctcttagtgtctcctaaaagtcaactgtttactgtcctatcaaagctattttactgttataggactaggaaaaatttaaatttaaaaatcacacgaagaataaagtaacacaaagcaaaactgtttatgttttatctttttttttttttttttcagacaagttcttgctctgtcacccgggctggagtgcagtgatacaatcttggtttactgtaacctcaaactcctgggctcaaggcatcctcctacctcagcctcttgagtcactaggactacaggcctgctaccatgcctgggtaattaaatttttttttttttttagaaatggagtctccctatgttgcccaggctggtcttgaactcttggcctcaagtgattctcccacctcggcctcccaaagtgctgggattacaggtgtcagccacagtgcccagcctcttttggcttttttgaatgatatgacacatctccaaaacatagcacagggtggatccaagagctcctggggtaagagctgcctggacccacaggtccactctcatgggctctgattagagctgcactgccccattccctcccaataccaggagccctcatttcagcctcagctcccccaactttgacacagtattttactcaaggtctctgttatgaattgaattgcgccccccaagaagtccaaaaagttgtgttgaagtcctagccctggccccaacctatgaatatagcctcttgaaaataggatctttgcggataaaatcaggatgaggtcattagggtgggccgttctccaatatgactgttgtccttataggaagaggagggacacagacatgcccagagtggaggagacccaggaagaaggtgatgggaggatggaggtagagattgaagtgctgtgtctataagtcaagaaatggccaggagaaaggcctggaacagagtcttcccttgagccttcagagggagtgtaacacctgatttcacactcatagcctccagaccgtgaaggaatagatttctgctgttttgaagctatgcagtgtgtagcactttgtaaaggaggcctcaggaagcgaacacagcagcttcggtgaacgcagtgccacatggcacagctccccccttgcctgtgtgcagggggcagcaatgtcagcaggacaattttcaggcaattcacagagactgtggcttggagttgggcccaggctggccagtgtcttgggagtctgtgaggcctcgaccctcttcccaggttgctatctgcctgccccataaacacatcctgagactttgctaccttcctttcccccttccttcctggtgttctctcagagctgtacctgtctgcactgcctggtctccttggtacatcacctgcttggacatcagccaccctttctcagtgcctcgattcaggatgccataatatatgttttctatgaaaatgaagcttcattctgcctgccgattcctacctattttaaatcacagctgacatccacgcctcaacaaagattcccatagctgtagctccatgattcatgatcgcgtctagaaagggaacattttgcaacagatagccaggcccaacttccatggcttcatgcttcttcccaggtctctgccacccagcactgtcctctcccaggagacagatgcatgctaatgccacgtgtgtgtgtaacaggtttcccggctggctggaagcctggtccccagttgcttacagtcttggcaagttaattcacctcctcagagatgccctcctgatctccaggtgtgagtccctgctccttgctccttgttccatgatcctttgcacatacttctcttaccaacccactaggtccaaccgcgagtctgtgagtgccctgaagaccttgaatgtgtgtcctgaagacccctctctgcaaggggacagtggagcttggtgtttaaaagtacaggtcctaggaaaatgcaaaccaaaatcactctgagatgtcgcctcaaagccatgaggatggccagtatcaaaaaccagaaaataacaattgttggcaaggatgtggcgtcattggaagcctcatgcatggctggtgagaatgtgaaatggtgcagatgctgtggaagacagtatgtcagctcctcaagaaattaaaaatagaatgaccatatgatccagcaattccatatctgggtatatacccaaaagagctgaaaacaggcactcaaacagacatatgtacactcctgttcacagcagcatgattcacaataccataaggtggaggcaaccaagtgttcattggtggatgattggataaacaatgtagtgtagacatgcaatggaatattcagccttaagaaggaaggaaattctaagacctgctacagcatggatgaaccttgagaacatcatgctaagtgaaataagccagtcacaaaagacaaacactatgttattccacttataggaggtccctagagtagtcagattcatagagatagaaagtagaatgatggttgccagggatttggagaggggagaatagggtttaataggcacagagtttcagctttgcaaggtgtattagtcaggattctctagagaaagacaaccttggggtgtgtgtatatacatgtagaaagagatttgttttaaggaatgggctcatgtgattacaggggctggcaagtccaaaatctatagggtggctttggctggctggagacctagggaagagccgatgcttctgctggctgaattccctcttccttgggggaggtcagtcttctgttctgttcaactgattgggtaaggcctacccacattatggaggataatctgtttactccaagtccaccaatttaaatgttaatatcatccataaaccctcatataaacatataaagataatgtttggtcacatatctgggcaccatggtctagccaagttgacacagaaaattaaccatgacacaagttgaaaagagttctggagatggatggtggtgatggtcacataacgtgaatgttctttatgccactaaactgcaaacttaaaaatggtaaagatgttacattttatgttctgtgtattttgccacaatttaaaataatgtaattttttaaaaagcacaagctctagagtcagaccaccaggttgctttcttgcgtcacgtatggcctcatgtctgtgcacaggtcatggagactgtctgagtttccttcacctcatcagaataaccagactggggcgggcacagtggctcacgcctgtaatccaagcactttgggaggcaggcggatccgcttgaggccaggagttcaagaccagcctggccaacatggtgaaaccccgtctctactaaaatacagaaaaattagctggacatggtggcacgtgcctatagtcccagctactccggaggctgaggcacaacaattccttgagtgcgggaggcagaggtttcagtgagccgagatcgtgccactgcactccagcctgtgcaacagagcaagacttgtctcaaaaaaaaaaaaaaaaaaaaaaaaaaaaagaataattggaccagggacaacgatgccccataatagggaggtggtcagaataaacaaagcaacacttgtaaacccttaatttgtatagtatctagcagaaagtaggtgttgataaattttggtttattattattatttgaggcagagtctcactctgttgcccaggctggagtgcagtggcgcaatcttggctcactgcaacctttgcttcccaggttcaagcgattttcatacctcagccacctgagtagctgggattacaggcacgtgtcaccacgctcagctaatttttttgtatttttagtagagacagagtttcgccatgttggccaggctggtctcaaactcctgacctcaactgatccgcccgtctcagcctcccaaagtgctgggattacagcgtgagccaccgcgcccggcctagtttattagtatcattattcccggggtccaacaatgccagacacacggcaggtactcagtgcatggtttttgttttgttttgtttgttttgttttgtttttgaggccaagtctcgctcttgtcacccaggctggagtgcaatggcgtgatctcggctctctgcaacctttatctcccaggttcaagcgattctcctgcctcagcctcccgagtagctgggattacaggcgcctgccaccatgcctcgctaatttgtgtatttttagtagagatggggtttcatcatgttggccaggctagtctcgaactcctgacctcaggtgatctgcccgccttggcctcccaaagtgctgggattacgggcgtgagccaccgcgcccagccccagtgcatgtttgttgaatatgtgactgaataaatgaccttgttcaaatgacttaattgctctgtgcctcagtttcctcatctaaaaaaacttggggataataatgattaccatgaagattgactgtggaaatatatatgacatgtgtatatatatatgtgtgtgtgtgtgtgtgtgtgtgtgcgtgaagaactcaggttggagagcctgatacagcaagtattagacaaatattggctaccattattattagtggtaataatggcaaacacttttcctattgcctacccctttctttggagcactgactggcggagatgtcatgcagctgtggctctgtgaagggctatggaagaaggaagagttctattcatccagtgcctcaatggcacaggaactagagtaggggacaccgcagaggtggattttccctgcactgacattaaggaagatgaccccttctcacctctaacttagtattgcaaatagctgacttcctgcagccagcatagttgagcacttacttgcacttttgtcttgcgttgtcttgcattgatcttttgttcctccgcctcctctttgttccagtcctagctccagtcaaaactcaaccaggatcctcctccctcagaaaccccctgactgctccagcccatgccctctcctgaagaataggataccatacctgggttgagttttaggcgtgccgtgaaactccagccttctctcccagctaagggttaggtttgtgggtcaggaaccacgcatgatatttatatttacttctctggagtctcccaaagcacccagcgcccagggccatgagtgatccttaattaaacttgccttacatctgaactatcaactccatgagggcgagagctgtcattctattcctaccatgtctgcacaaggctgggtagattttaaagctcagccaatgtttatggaggattaaaatgctggactcgccctggatgcctgaggcagtcaagcctggggaacataaccagagcactctactagcagctcttggtgtccgaccctgcagatggagaaggagaagatacaggaggccaggctgcgcaaaagattcttgtgtcttaccagtcctgtgataggcaagattcactaaagcccgaatgaagtatatatgtctttagtctcctcccttcactatgctctgactctaccctgccaaacccagtcttgatgattaatttcatttccccagcatggacaagaggaacagtccaggcacctgagaatcttccaatataaagcaatacactggccatgtggcactctggctgtttactgaccatttcccctgctcctcaaattgaaaaggcagcagcaacttgggaactaagcgcttggatgcactcggtacttgttaattggtgctcatgctctaaggagctgagtcttggggttaggcttgaaatcctaagcagatgagaaaccctgccctctttaaccactgctctgctctcctcttgggtgcctaacctcgcctgtgggagggcagccctgttctttgtctttctccacctccttccagcaagatcgtcatcagaatggctgtggactgggttccatttaagattccccaggttggccaggcgcggtggctcatgcctataatcccagcattttgggaggccaaggcgggtggatcatgaggtcaggagttcaaggccagcctgaccaacatggtgaaaccttgtctctactaaaaatacaaaaattagctgggcatggtggtgcgtgcctgcaatcccagctattcgggaggctgcggcaggagaattgcttgaacccgggaggcagaagtggcagtgagctgagatcgcgccactctagtttgggtgacagagtgagattccgtctccaaaaaaaaaaacaaaaaaccaaaaaaaaaaaacaaattcttcaggtctcaggtatctatcagttggaggttctaagaatgggatagattagcagtggagggaggagataggaacccactgaaaggactgagaggaagatgaagggttaactggacacaagtgtgtaaagattatctgagtcaacggctgccgaaaattctggtatgagatagcaatgagatagtttgagctcaaaagctcaaacttttgagatggggtggaggtagggtacagagaactgagggctctgataaaggctaagccatgggcccaactgaggcatcgctaggttgatgcctggtggggttaaggcctccatggtgtttcttctattaaccatcacaatccagggaacttggatattgtcattcttgtgacaaatgaatatgtcccatctccctcacaaacaagaattcgggtctgtgacatggaacagagctctccaacgtgttgggagttccagggatatggaggtcattctctcagctatcaggaccaccaggtgtggggctggggcggccccagccatcaccacaggcctccagtggactccccagtgaccctaatattatccttacctaaatgtgccaacccattaaaaagattgggaagagtttctgtttgggatgatgaaaaagtcctggatatagacagtggtgatggtgacgcaccattgtgagagtgcttaagccactgaattgtacatgtaaacatggttaaaagggtaaatttcatgttatttatgttttaccacaatcaaaaattttttaaagattgggaagcacaggctccatggagattagagaaggaggaggggctgctgactaggggtagataagagttgggaggacagagaatcgagggagaaatatgctgcaagaaggggaggttggggccttctctctccttctccccgggcgatccacaaatcctgtctatgcagctccatgttcagccccaccccctctccacagctttctctgtcccctcaggtctttagagcccacagaatgccacctagcacttagattctctgcttcatggacatcgatgtctcatctccagtcagactgcaggttccttacagacaggtggcatatgctagacatctctgtgctactcacagggactggcacattctgggcacatactggggacattctgggcacatactgggtactcaatacccgttatacagtaagtctctttttttgaacaggattggggagaagtaaataaattttagctaactaataaaacctttctcttttagatatagaactaggaaatgagtgctttacttctctgagcattttcacacaccaggatgtggttctaaagtcaacaatttggtgccttatcaaggtagttgtacctggggtggctcagacctggggtgacataggggtggtgatggtaggtattgattttagtgaggccaccactttctgagtctagaactcttccttgggaagagccttcagaaacctcagtcttccatcacacggtgcatttgttgagcagacgtcttctgagttggctattgccagactggatgctaaacaaattttgactatttgcaaacaagctaaaaaataaggacaaagatatgcatgccttgtagagaatctttaaaataatgtgaaatcctgaaaacgtctggcacatggtaggcctcaccaaatatgctgtaagatctaaaagctgttcttacacgagaattccagaatgtttcaagaaaggaaaacattggtctaaccaacacaaacattgtttttatgtgtttgattttaaaagtctgtgaaatgactttttttttagctggaatcacaagctctgtgcctaagaggctgggtagggaaccttggagaagcccagttgggctttaagacgagggggagtgctgaggactccgatcccttagtccaaagaggacaacttccactcagctccagccaccagttgccaaaccttttgcttttttcacaacagaagatggaagtccagatttttatgtgacatttcaagatatttaaaataacctggagtcaccaactcattcttggccacgaaacttataaacacgcctgcattcatgcatcctctgacaggcctcccagccaacgcccctccctcacctgtgtccaggtctcattgtctcctaccttctctgggattttgcttttgtagttcaccattgtgatctgaattctgacccagctgctcctgatgctgctgtcaccgagactggatttgcttgcagcgacatccaaagggtttggaagcccttcgcctaggtgacctctctctagcctccagcggcctcctcctccctgaagcgcgtctttcctcggctcctctatcacctctacctggggctttcctgtccagtccttgcacctgcactctccaatcttgtttacaggcctctctcggtgccatcccctaatgttggtgtcccagaggcttctgtcccaggcccccaatttctcactccacactcagttctttgggaagatcatccgctcccccatagcttcagaagcacatgcggatagttctcagctgtatgtctgcagcctggccctctcctgagctctccacccacacagcctccttcctgctgggcacacactgctcacaactcaggagacccaggactactcccccagcacaaagctgcccccaacaccgagtctcccttctgggagtatgccactgtcatccagtcagtgtcaaacagaaatcgggctgagctcattgattccccgacccacactagtcaacaggtcctgtatcctctgcctattaagtgtctcttgaatccatcacttctctgtctcctctgacacaactatggtcccaggtcaccacaacctgtcaccaggacaactgatgcgcaggcctccaatttcgctcccgagttgtctagccaaacatctttccaaacttcaggaatgtgagcgtggccctgttcctgccccgcctaaccttgccatggttccccctcccttggacacggtctaaactgcttcacaggtgtgaaagaccccttcatctctcaggccactgctctggcctctcatccccgctcactgggaaatgaataatgctgcgctccaagtcccacgagaggcagaggggggtcaaacccaagactactcactgcaagctccataggctccccatcgtcctaccctccccgttcacggccaggcagccctagctctcatacctgcgtgggctggagaagggcaatacagagacttctggacccagcagccttaagaaaggacttgttgcaagtgcgatgtgaaagcaaccttcatctgcagtggatgtgccacctccttcctcacgccaccgagctccgaatcccccaggagagttgcggagaccacacagagctcccaagcccacgccaaaggacggcctgccccccttcagctctagtcggtgacacgtggcgtgagagaaatgcaccccaatcttccttccttatacttccgagctagaagcaggagccaggatggtggcttagtgaataaatatattacatttttatttgggagaaccaattaacagcagctggctaaatgtaactcacccaggacagaaggggaagtggaggggggtggtctgtgtgtggatggaggtgggacagtggctaaggagagtcaggtgttccctcccccaattcatttagcagccccagaactttccgattttaactttaatgaaactttaagtacataaataaccactctttcctgccctggttgaggccgcgctgggtccgggaaatatctgctttccaacggggcacctgggtgggagccttccaagaacttcagctcagcggttcccagcaagggttcgctgagtctctgtcctaggaggtccgagctgggtatgctgtgcggacgcagacactgcgggaaggaaacaggtgtcccgcggcggccaaaccttcgggcagcagcccaggtcgccttgctcaccccaggcggtctcatggcacgggcctctcgaaactgtgggcaagaaagggtcctcgtgagaactaggctcagaagaagagcgggggcggcgccacctcggggggagcggaccaggctggggccgcaagggcggcgtccggggccgcgtgggcggcttcgccgtgaatgagctggtgccgcaccaggtgggtcttgcggctgaagctctttccgcactgcgggcaggagaaggggcgggagcctgtgtggatcgcctggtggcggactaggttggttttggagctgaagctgcgggcgcagacggcgcaggcgtgggggcggctgccagtgtgcaccgcctggtggcggcccaggtgcgacttgcggctgaagcggcggccgcactgagcgcaggcgaaaggcctggcgccgctgtgggccctggagtgggcgaccagattaggccgcgagccgaagcggcggtcacactgcgtgcaggcgaagggccgttcgcccgtgtgcacgcgcgggtgccgcgccaggtgctgcccatgggagaagccgcgcccgcagtccgggcagaagaaggaccgctcgcccgagggggcgcgctggggcaccacgggatcggatcctgggccgcagcccggtccgccaggcgcgctggccaggggcttggcggcgggggcatccacggtggcgcccagtgcgcactcatcgcacccaaaggggcgaccctcgctgcggtgcagacactggtgcgtggcgaggttctttttccagccgaagctcaagccgcagtcggagcacgcgaaaggctttggcccgggaaaggatggggtcggggacggggcagtggaatgaggagaagcggacgagtcgggagagggcctggccgggccggccgtctggtgcaccctttggtgccgcaccaagtgctgcttgtgcgtgaagctgcgtgcgcactgtgcgcactggtagggcctctcgcccgtatggatgcgctggtgccgaatcaagtgcgtcttcttgcgaaagcgcttctcgcattccgtgcaggggaagggccgctcgccggtgtgggtcttttggtgcgagcccaggtggatcttctggctgaagcgcttgccgcactccgcgcacgggtagggccgctcgcccgtgtgcgtgcgcaggtggcgggtcagatgggccttcttgctgaagcgcttgtcgcactcggagcacgggaaaggccgctcgccgcggtggctgcgctgatgcagtagcatgtgggcgcgctgcgtgaagctgcggccgcagtccgggcaggcgcaggggccctcgccccggtgcagccgctggtgcagtcgcaacgtcagctggtcccggaagcgccgctcacactccccgcagccgtagggcttctccggcatcggaccccacccagacagcgcgagcccactcagtgcccccggggcccctggctccagtttgtacgcggcagccagatgccccaggtcaggcgcgggaaaggggctgggaagtaacgatagatgctggggccattcgacctcctcttctgcctcctgatcttcgtcctccaccttcaccttccgaatcatccactcctctcctggaaagtcaaaacaagaattgtctattgagctccacgtgcggcaacgtctatttaaccacaggatctccacttcctggagccccgcggtctggctctgctctccactctacctaacgcttcccgggagtgaccaaatccgcagctcttctcaggccccctcctgcattctcctgaacctgtgatgcgtgtgaacaccacacggctcccgggggcttcttccccggcctggatgtgcccaggagccctccagcacccctgaagaggaaggttgcccaagtttcagtcctcctgcttcgctccaggttcacatccctttggtggctggcccagatcttcctgctccagcagtgcctttctgggacctcagtctccatctctggtccagcagctctccttggtactgcaaactggccgcagctcagcagctttctcaccacacacctgagcttcccaaactgagccctggctgactttaaccttaggactagagcctccttccctggtggccttgaaaacttgatctttgacatctcacctgggctgcttctcttgctctctaacccctacccccagcccaccttacctctagtggccacggaaccagggtacccacgtattcctgctactcccttctttcctgctggacagcctgaggagaagtcccatttaggaagaccacgatggagtttacagggtctggggaactagtgaacactggctctggagaaacagggaaggccctctagggaagcctcagcctaagggcaggttgcaggggattccgctggagtgttgcccctgtcgggtgctgcaatggtccagcctagaggaaggagcccggggtccagacgggagggtccaacttaggttctcctctgtcactaactaggagtgtgactttggttcagtcacttaacctctttgagttacatttcttagtccgctaagaaaatttgccctttgtgtaagagttggactagtttaaagctcccacgcctgtgctgcatcatcagctcctgggaaacgttgagaaaatgcacaaatgggggcaaggcccacgaacgtgttctcatctttaaagctcccaaagtgattctcatttgtgaatcatttaagcagataatttgggttcctgtctggcctgagccttgattccatcacacgtggacttccacaatcagaggtactcccagtttcttctatcagtccattgattccagacccctgtctacttatcacactgtgatactgctttcaccttcattgtggcactctttacttttctactcaagaaccatcaatagctcctatttatttatttttaattgagtcagggtcttgctctgtctcccaggctggagtgcaatgggacgataatgactcattgcagcctcaaacacctgggcccaagtgatcctcttacctcagcctcccaagcagctgtgactatgggtgtgcaccaacatgcccagctaatatttcttactttttcagagatggggtctcgctgtgttgcccaggctggtcttgaaatcctggcctcaagcagttctcccaccccagcttcctgagtcgctgggattacaggcatgagccacagtgcccagcccagcaccctattatttgaagataaaacaggttctagctgcatctgaggctcaccccaccctagtccaactttctttctcccaggcatggaccttccacttcagccaagctgctctcctcccctttcctgcttcaagatcttctcagcctagaacgtcttcccatcctccaccccacccctttcagaactgaagtctacacctttcttaaaatgcagcacaaattaatgttttttgacaaattcccagtgcatgcggatcttttggcataaactcctatagcacttactgttaacacttttgtgcttatttgtgacttgcctttatactgttcttttaattctttgttctagctcatattaaggtcatctcaaccagattttctcttctgaggtatggacattttgtgttccatttcttttgtgtctaataagaaaggtgtctttatgtgtctgataaaaatggggactgctgccacttctcgaggaccaactgtagatgaagtgttgtacacacactgtcacaaaccttcacaaaccgaagctcctggaggcaaggtggcctatccaagggcactcagctagtaaatgcagaacaaagattcaaaccaggtccaggtaactctacagttcatctctttccactgtacttaacacagcctgtatgtagtcggcactcaataaatccttgctgaataaatgatatccctcaggcaaaaggtagtaaggatggtggcagtggaaggaagtcatggtgggattgttgagagagagtgagcagtttgatcaccctgggtatgaggagatgagttgaatacagcagatgtggagcatctgggtaccctcacgatcagtggaagctggggaaggcggcatgtcaggggagaggcagtgaaaatgttgatcaaagccatgtatcttcatggcaactgtaattagacttagactgggagaaataaagagggggaggtaggatttctagaaggcatttgaggggaggctgtgtttctctttggtgaccagcctctctgactcctgccatctacagatgtgaaattccctttcggcattgaagctccacagcagaaaggtgccagggcctgaactcaacttgggttagaagggcctggactgcctgtcttgggggattacctgcctcatgagatagcagctccggagcttgctgggccccgttcccttggcctgagcccgtggtgggatgaagtgatgggaagactcacctgggcaggtacccacaggctgagccttctgtgctgagcacgcctggcctctgcagggagcctcggcttgttctgtgtgggcaccttcctccggtgtaggggcctcgtgccctggcagagaataggatacctcaaggactctggagacatcacagatggccaaagggccccactggtgctgggaagcaggagcatttgaaaccctggctccagcagggcccacagggttcctcccacatcctacctgaattaaggggctgagttcccagcttccctggggctgcctcagactccttcaagcagggcggctgctaagggtatgtaatgagatggactacaaggttacaagagccaccactgtgaagagttcctggaatatgtgtatgtaagacagtggaagcaaggaagtcccctgacctgatgcccctaggagaagggctggggacttcccagcccccagatggaccctggttccaagcaaatcactggggagaatcaggatgtcaaaagccaggcacattcctgccttagtgctctgtcctggctgtactcctgcctgaagcacttttcccaaatctgctgagctgccgccttcacctcttttatttttctttttttagagaaaggtcctctctgtcacccaggctggagtgcagtggcacgatcatacctcactgcagcctgggcttcaagggatcctcctgccccagcctcccaagtagctgggaacacaggcatgagccaccacatccagctaacttttaattttttgtggagacagggtcttgccatgttgcctaggctggtctcgaatggggctcaagcaatccttccaccttggcctcccaaagggctgagaatacaggcataagccaccatgcccggcttccccaagctccttcaaatcctgcacaaatcttaccttcccaaagaaacccagtctcctcaccctatttaatcctataacatgccccacccacccccacctgcagctgtctcggcccccttcaacctgcttcactggacattatcctctcccccagagctcttatcacctttgaacatagtttagaaatttccttatttattgtttgctgactctctgcactcattaggattaagctcttgaaggtagggatctttgactatttggtcactgaggtattccaaatgtttagaatagcatcccacacataataggtgctcaataaatatttgatgaatggaaggaaggaaggaaagaaggaagggagggagggaggggggagggaagaagggagagaggtagggagggcaggaggaaagcagggggactcctccctgagcctttccagggttcctgttacctacctgagcacacccccagtgctctctcttccctagaagaggacatctgctcctgggcattatgggatccttccctgggctcactttggggggccatctctggctgtcccacagagaatcctgttacaggcagaaggatgggtccaagtaaagcatccagtacagaacaagtaatcagaggcgggggctgttccccttcccagcctgcccaagagacttttcccaacctgctcaggaaggacagggtctctcaccacatggacagggacaggtatcaacctcagtccctttgagttgagtcaaaaaggacagaaggaagagatggcatagatgtaaatatgactgtgctctgtgagtgctcaagtgcacatatggtctagagcgcagcctccaccatgttccaggcattcagacaccccgtgctacagaaaaggaggctgacctacaggcccctggggcctcagggttgcagcctcctgagggtggctctgctgtctgagttgtagatgcccctgaatcctcctaagcttttccccaagtcccttcatttctgccagctcacccagggagctgagggcctccaaggtctctctcatggtaacccagagtagctcctcctggggatcaggccacagaacctatggagaaaagacagccttgttcagatttttcccacgccagcttccacctgggccctggctctgcccaacctctccctatgggctcttccaggagctccaaaggtgacatccccaggtacagctgggggaaatttgggaaactgggtttagaaagccaagccaagagatctttgaaggtggcccaagaaggccttgaaacgatttctgtcagctctggaaaccagccgcgccaccccctcacctggcaggtctgtcaccgccaaccccggcccatcagcaccgcaactccacgccccagcgtccttgcctgggaaagtgcaggcaagattcgattctctggggagaggcttgagggtgggagcccagggtggggagtgggaaacttcatctcccaggtcctccagctgtcactgcccgagctggtgaaataggagccagcccaggggcgggagtgagtgtcactttaggggtactgcttggggaggtcctcgagaggatcctcttgtagctagaaaatgatcgcctcttcctaaacccctaccacaaaaccacctctcacccgtgccgggctgcccaaggcccggacaccgcccctgctgccccttccctgctccgccttccgcggctcccccgcccctcccccagcagactcccctcccccatctccccggcagccttccctctgccccgcccctcccgctccctctgccttccgccctctctcccctgcgaatcgggccggcgcctcggctccgcccccggccccgcccctcaggctccgcccgcccgagcccggcagggccaacccctcgaggccccgtccgggtcggccctccgctgccaccgcctcccctgaccctacgctccgggccgcctcggcggcagcgctcccctccccctctcagactccaggctgcctttccctaccctcccggttctcccccgctccatctccctccccggctgcacaccctctcccttcctttccccctcctcttttccttcctcgccaacccccgccctcctcctctcagctcttttccccaacccagttctcctctcccctccctcctctcctcccccaccccggtttcccttccttctcctttcctcgcctcacctcggttcccttcccctccccctttccagccctcccccacgtctccccaccgccctccccctcccccctcccttctgcagctctccttcccctccgaggcccccgcctcccttccccctctgtctccccagcaggctccagcttcgcttccctccccgtccccagtccccagaaccgctcttcccctcccccctcccaggctgcttcccagctcccgggtcctccggcccccaagcctgggggtctagggctgacccgctctctcgggaccttcccgcgggccctgccctccccactccgtctcccctccgaacacccctccgcgcctctcttctccgccgcggcgccccctccctatttctgctcccctcggacttctcacccctcccaagttttcctcccgacgggaccctcagctccacctccctgccccgccgccctcccaagcagctccgatcgccgacttcattccaggtcccggccccctccccagctccggggctcacctgtcagcgccctcctctcccgcccctaccgagtggcccggtccccagcgcccgcttcttcctccccttccccctcggccccctcccacactccctctctcctcccctcggggcccgtcgtcccccttcccacctgcctcccgcccgaccccctcccagcccccgcccttccctccagcccccccggtctcctctacccccacagccctcaccctgcccgcgccggccttgccctcccttccccccagcccccgacctccccggacccgcgcccctcccccacgcccgccgtccgcgcccctacccccggggctgtcacctgcgcggagccggccgtgacccaaccgcggcgctgagggagacgcgggcggggccgcctgcagaggagcctccccggcccttacctggctggccggccgctccgcccgcgccgcggggacccaggcgcccgggcctcctgccccgccggctctgctcacaatggcgctcgccgcctgcagctcgggtgctgacggcctgaaagactgacagactgacagccccgaaacttcgcggggaggagagggatagacgcgcggggagtcgaagccgggaaacggcgcctgcaagggaggagggaccgagggagcgggcggagagccccggcgcaccgggctgggggaggcaggggcagggggtttcaggagtggggtcccaggagggagcaccgtgggcttaggtgggcaggtgatggtcctaaggctccgagcctggagtaggtgtggaagtgggagctcaggacgggggaggggaggggaggggaggggagggtgatgggagagggggtggaggagggcgaggaggctggggaggacaggcactcgggctgcggggaagggtgccaagggagggtgctcgcggccgcggagggaggagccggggaaaggtggagcgcgaacgggtgggggggtggcggggaggagttgggggaacgaggaggggccgtgtcgggggggagccagcgagtcgtgcgctgccgtctctaagtcgccggtgccagccgggtgtgcagcgccgcgctcccgcgggaggacggcccggggggtcggtctgggaaactccggccccgcccccattctccacccggattccaccccgatccacccagacccgcagcccctcgcctggagtcccgaggacccgattcgaaaccagccgcgggagccgtgggggcaggcgggagagagggctgggcccctgtgcttgcgagaacgggtccttcgaagtagaaactggggagaggactttaagccaggtcccctgggagaaggccgggccaggtcgggagctccagggggcaaggctgggacggggctgggcggagattctgagggcggggtccgggggagggtctgggagggggctgcagagaggggagggctctatgggcgggagacgattgctggggggcctgctggcccggacaccacctggagttagatgtggagggcagccctcagccctcagccctcagccccagctcctcaggggactccactcgccctccctgcccaggttacgaggtttctccttggccttgttcccgctgcgcccactcctgaaagctccggagatgctgaagtctggactgttagttcccggtctcctctccatgaactttctccaaacccctgggttccagcttcctcccttctgcccctttacgggaaagggtgactgcaactcgggtctcttcccaatcccagtgctgcctgatcagccccggtttgaatccagagctgagtgaggctgggaaggggagggtgtgaatggcccttgagctcctgctaccacagcccaccacaaggatgagtgcctggaagagcgcccatcactcgggctcagctgtgaaggctcctctgcctccaggatgaagggagcacctggagtagcatgtgtcactgtgcgtgctggggtgtggccgagcacctgtgccggtgttgtgagacttacagtgagagtgtgcatgtgtgtaaaacaggaaaggggggtgtctgggtgtgcgtgtggctctttctgaggactccagagcaggagttgatcccagtcatccgtgaccccctgagagactcactctgggcccttttttggccctgggaccaatggtgaacccaggagaaggagagcccggcccagctctggttaacagcagcccccttcctcccctaggtggaatgactctacaggatactcggagggatatcaggtttaggagaccgaggggtgtggagtcggagccaggctgcattccagcccgggtgtccgggtgtgctcagagctctgctgggaccagggtggaccccggattcccctgtggagcctgtcactgcccctcccagccggattctcggattatttcatccggcttagctctgccccagggctgggggagctggctcccccgcccactccttccagagggtcctctcattcctcagcataggctccccagttctagaccccagagactctaggagaccctcgaagaaggagacagggtgggcccaaccagccacacataatcatccccagcaagaaactggaccctggagaaaagggtacatgttgcccacgcatctccacacactcaggaaccccagctaccctagaagtgctcccactcactgcccccgactcctcagtttgggcaagagaggggcgggaggcaggggagcatcatccaggcagaagttcaaggctggaagaccccatcagtcgtttagcccaggagctcttaaccttttcatggggtcatggccctcttgagaatctaataaaagtatagaactgtcttcagaaaaatgtgcacatacaatttcaaagaattactggagtctgagacctatttgtgcatccctgggaagtccctgaaatttttactgggaaggaaattgaggcccagaaatggagggtggcttgcccagagccccatgttaatttgtggtagtgcctgagagtgtgaaaatacacacacacacacacacacacacacacacacacacacacacacacaaagggaaacagatgcactggaaggggacaggaaggagactgtttccagggagagctggcctctgaggggctggtgtggcaggtccaatccggttgtgggcagctggtgccctggggcatgagactggaataaagccccccacagcccccagaactggccactgggctgcggggaggctgcgtggggcaggagagagcaccgctggcctctctgccctctctgcagcattgcctctcttgagcccaagcctcacgttccccaaaggtgccctgggggtgagggcaccatgctactccctgccctcctctttgggatggcgtgggccctggctgacgggtaagcagcccaccctggacccctctgacaagggtcctccttctgccgcatgcccagggaccctctggggcatcagactccgtgccccccacccccgggatcctccctccacccccgccacttcccatgagtgtctctccctaccttagcatcctccttacttcaataaccacccctgggagtggtgtcataggacagggcttttggtgacagagggaatggtggcagcagctgtggttccccatcatgggcaggcggtggtgtgagtggacagagaccatccgtgtggaggaggaagtggcaccccgtcaggaggacctggtaccctgtgccagcctcgaccattacagccgcctgggctggcggctggacctgccctggagtggccgctcggggcttacccggtccccagcgcctgggctctgtcctatctacaagtgagtaagggtgagagcctgggctgtctgccaggcaggaaaggagtgacaggccggacatcctgagagtggggaggctctggaggaagcaggcatttgggaagtaggtttgcagtgggcctggagaagggtggagcgtgtgagattagggtggggggtgagtgcgcgctacggtgggcaggacagggagaggcccgaagcctgctccttctacccaacccccgctcccaatccccgtggtctgccctcccaacattattctcactttgtatgtggggaaattaaggccggggaaatgatgtgattagagtagctgacaaaactgaatgtccccaggcctccccagggtgggactgggctgaacgctaacatctcctccccgtttccacctgcttggtgggtgcagacctccagaaacccggcctgccaagtggaaccggacagtgaggacttgttgcccaggctgggggggcgcccactgcactgagggtaagcacctgagtgcgtttggggacgcggtaccttctgggagtcctgggcaggggatgctagctcagatctgtggtttcaggcagagaaccagggctgggctgagagctccaggctaccccatattcactgcctgggtctgccccatcctccccacctaccgcagcccttgccaaagccagtcctgaaggccactgctttgccatgtggcagtgccagctacaggcaggctcagctaatgcctcagcaggaagcctggaggagtgctgcgcccggccctggggacaaagctggtgggatggcagctcccaggcctgccgcagctgctccagccgacacctgccaggtgggtccacagactccagcctgccagacaggcacagtcctggccatcaccccttccgcctccccaggcactcccatgtggagttcttgtgctctgggcccttctacagggcccatactggctccctggcccactagagtgaccatgtcctgtctgcctgcctcccgctgtgccgggagccctgtgtcctcacccttcacctctgcctcacactcagaggctcacagttggtgtgtctctcccaggcagtgcctcttctccagccctcctgcagcccctggcaggggctgtgggccagctctggagccagcaccagcgtccctcggccacctgtgcctcctggtcgggcttccactaccgcacctttgatggccgccactatcacttcctgggccgctgcacctacctgctggcgggtgctgcggactccacctgggctgtccacctaacacccggggaccgctgcccccagcctggacactgtcagcgggtgagggagggagatggggcagccacagggaggaggctggacaggggaggaagagagccccagcccccttttccactctgcatctcctcaaggtccaggtgactatgggacccgaggaggtgctgatccaggctggaaatgtgtctgtgaaggggcagctggtacctgaagggcagtcttggctgctccacggtgagagcactgggagagcaagaggctgcccaggcccccacgtgctcctctgacagtctctccaccctccaggcagggtcagaaaaggagcagggggctgtttgggaatgatcccgcagtgggcccccagtcattgctgttgggaggcactgaagcgcagatccagtgaggggccgggaggaaccaggcctagtcccgaccctctgcaactacccccaccaaactctcacagcaccagctcagacaagtccctctacctaactgcccgagcctcagtttccccgccagcctcagaggagtgctgtgaggtagcactttggtgctaagcaatgggaagctctcctaacagaacctttgtcttggctgggctgcagggtgaggtgggggtgagcttcctgcgtgtatgcctgtgtgtgcatgggtgcagtgtgtgcatgtatgtgtgcatgcatgtgtgtgcacgtgcacgtgtgtttcatagttcacttgaagtttactctctccagagagcgtctgcagctttcatgagctcctcaaagggagctgtgatggaaatcaatcactctgctgtaaagcatatacttttggtataaagtgcagagctctctagaatgtgagaattgtgtgagttatttcccttctcctttccatccctgggtagctgagcccagctgtggtagtgggaagggtgagaattgtggctgcagggggcaagtgacctctttctgtgcccagggctgagcctgcaatggctgggggactggctggtgctgtcaggaggcctgggggtcgtggtgcggctggacaggactggctccatctccatctctgtggaccacgagctctggggacagacacaaggcctctgtgggctctacaatggctggccagagggtaagtggggtgtggtttgttgctggtgtagcagggaagggaagaccggagaccctagacccagcacccctgcctcaccccttctcagatgacttcatggagccaggcggagggctggccatgttagcagccacctttggaaattcctggaggctccctggctcggaggtgaggctgccactggggcccctccctcccagctgcctgcccattcccagcttttcaggctggcttctgactcctgcacctccaagcccttgtcccagtttcattgctggcctgttccctaggacagggactggccctctcccagatcctcagggcagagggcaggccttggggtcccacagaaagcccggctgcctgctgtgaactagccatctgaggccagcattggtgaaccagttagtcatttatccccaccactgcagcccagcgtggggctgccacctcgcctctctccccagccccaggatgtgggcggtgggcctgaaggtggggccctggtgctgtgtgagagcaggaggcatttttctggggtcctggttaacgtccctcatcactgccacctgacctgatggcctttgtctgcagtctgggtgtctggatgcagtggaggtggcccagggctgtgacagcccctggggctcatagacgcagatgtagaacctggccacctgcgggctgaagcccaggacgtgtgccatcagctgctggaaggtccattcgggcagtgccatgcccaggtatgggtggggtaggggtggtgtctggcacccaagggaaggtgatagagaagtgtcagcaagctggtctggccctgcctgtgggttactttgggccatctgtcaaacccccacctctccatccttggctttatctctgggaaatggcccgctcatatatgtgatctctgaggttccttttggggctgatccatttggttataagttatggagtgatggaagcaggaggtagggggtgctggctgtttgctgaggggccgtcctttcctgcaggtttcccctgctgagtaccacgaggcctgtctctttgcctactgcgcaggggccatggcaggcagtgggcaagaggggcggcagcaggctgtttgtgccacctttgccagctatgtccaggcctgtgccaggcggcacatccacattcgctggaggaagcctggcttctgcggtactgctcgggcctccccccgctgcaggattgactgaggggctccccaccctgtgggattgactggggtctggcgggggactacagctcactcctgtgcccacagagcgcctgtgccccgggggccagctctactccgactgcgtctccctctgcccacccagctgcgaggcggtgggtcagggagaggaggagtcctgcagggaagagtgtgtgagtggctgtgagtgcccgcgaggcctcttctggaatggcaccctctgtgtgcctgctgcccactgcccctgctactactgccgccagcgctatgtacccggtgacaccgtgcgccagctgtgtaacccctggtgggtccttgagccatgctgggggttggtggccaggtggtgcccttggatccctcccttctcttcaacctgcttcccctaagcctccagcccattctgggtcttcctctcagagactgggactgctgctggcatggctgatggccttgctggctgacctctaccccttcagcaggaggggcttccacgggaggggaggaacaggggtttttggggggtcacctccagctcaggggtcatctccaccccctcagggtggagctgatgccagagctcactgtctcacccatgtgcccacagcgtgtgcagggatggccgctggcactgtgcccaggcactgtgccccgccgagtgtgcagtgggtggggacgggcactacctcaccttcgatgggcggagctactccttctggggtggtcaaggttgccgctacagcctggtgcaggtgggcagaggacggtctgctggggtggcactctgccacagtaggggccctcctagagggcacagtggggctgactgtaaggaaacccctaaataaataagcgaaacccagagtcttcccaggaaaggccaagggagaaccaacactgggggcatggctgttacaggcctcgaggcctcccgctgggttctcacctcctccccagcttccctgtgaaagtccctctgtcatcaccactcagcccagggccactaaccaaaacccatcttcagtcctgtctctcacagatgggatgggctgagtttgttatagactacttcatgcaaaacaacctcaggggaaataagaggccctgctcccgccctaaacctcccccaatgaagtgagctcacttctcaagttcaggtgcaggccacgattttcgcaatcatctggggtcccctgagtgatctctccattgaactattggaccattcccactcctctcataagtagtgatggggtgaggaggtcctgggagcacagtcctcacagaggctgtgcctgtccatggggagggaagaggacagccatctcccccagcaaacacagtcaaagatgcatgtgtgtacacacactcacacacacacaggctgcacaccaaaacacagcaatctgcatgtgagcgcgcacatgtgcatgcaaacacacacacacacacacacacacacaggctacaaaccaacacagagatctgcatgtgtacacacagacacatacaggctatacaccaacacacagagacttgtatgcatccacacacatatacatgcacccatgtacacacttacagacagacacagacatacacatgacacacactcatgtatgtgcatgtagatttagcatgtgtgtatacatgcacacaaacatgggagaacatacatatccataaggaggaaagagaggagtcatctcaccccaacatgcagacacgcacttacctacacacactcgtgaacatacaaacatgcacacacacctccacatgacacctatgtgcacctccatggccctgcacacacatacacacagacatccacgcatgcggcccatggtgaggacgaagccccttacctggcagagagtctgcctggccggaaggtgggcagctgcctccaggtgcgtgctgaaggtgttctgtagggaaggtctccagaagcctctccggagagggttggcccgccgggccccactgaattccccctgcccgccccaggactatgtgaagggacagctactgatcctactggagcatggggcctgcgacgctgggagctgcctgcacgccatctccgtctccctggaggacacccacatccagctcagggactcaggtagcctctgctctgcactcttgaggcagtctcaggcctcctgtcactgctcctcctccacactaccctatggctttggagtccaaacactcttccccagcctcctacacctaagcacactgcctcaacttccccggccctctcatctctgaagcagacatacagagtcctgaggagatgttccgaggcatcttctgccccgtcctggggtcagatacaagtcatgcagctatgagagcttgaaaggccttaaggcatgaccagaccgggcaggccactcagcagggtccctccaaccctccccaaccagctcctggcttgccatctagctcctcccacacactgatcatgagggtgagggactggaaaatctgtgtgccaagggtagtccttgggccgcaggggtagggagctcaggtggacactctagttgtccccagcagcccatcctgacatgggactttctacttcccatccaagctccttcccttatcgcagccctatccttccacgtgccccacccccaccatcagaccccctgttccaggagctgtgctggtcaatgggcaggatgtgggcttgccctggattggcgctgagggcctcagtgtgcgccgagcttcctctgcctttctgctgctgcgctggcctggggcccaggtgctctggggactgtctgaccctgtagcctacatcaccctggacccccgccatgcccaccaggtgtgccagtgaggcggctgtgtgggggagcaagggtgcggtgggactgcattcagctgtcttacatgcgtgcttgtggcccaggtgcagggtctgtgtggcaccttcacccagaaccagcaggacgacttcctgacaccagccggagatgtggaaactagcattgctgcctttgctagcaagttccaggtggccggcaagggaagatgcccctctgaggacagtgccctgctgtctccctgcaccacccactcccagcgccacgccttcgcagaggcggcctgtgccatcctgcacagctctgtcttccaggtagctgggttgggctcctcccacatctgtaagatgggccgacacctgccctgccctccacctgggctcttgggaggatcaagggagaccagacaagcccagaggtggtattggggaccaaggggacgtagactccgtggaggagaagttgacccatttccccatctcctcccaaggaatgccacaggctggtggacaaagagccattctatctgcgctgcctggcagccgtgtgtggctgtgatcccggcagtgactgcctgtgcccggtgctgtctgcctatgcgcgtcgctgtgcccaggaaggtgcctcacctccctggaggaaccagaccctctgccgtaagtttgctcagcccagccaaccccacccaggctcctcccctcctccctagcccatcccccttccaggaatggctaggggcccagggtgcatctctacccttggcagactgccgggcttttcttcctgcaaaggcacagggggtgtgggctgtggggttccgagggggtggagagagccagtggtggctatgcccctgacctgtgtgtgtccctgtgcccagctgttatgtgtcctggtggccaggagtaccgagagtgtgccccagcatgcggtcaacactgcgggaaaccagaggactgtggagagctgggcagctgtgtggctggttgtaactgtcctctggggctgctgtgggaccctgagggccagtgtgtgccccccagcttgtgcccctgccagctcggagcccgtcgctatgcccctggcagtgccaccatgaaggagtgcaaccgctggtgagggcagcgacctttggggcaagaggaagaatgtgggggtgaagaggtagcttgggagataacgggtggggtgcagccttgttggttgcagcgtgcatgctgggggtgacagagtgctgatcacttcccctcggtcgtggggcactttagggtccataaagcactttcgtgtgcatcattttatctagttttactttcctatcataacctcataaagtaagaagtggaaaaattgttcccattttgcagatgaggaaactgaggctcagataggctaaacagcttgcagggtcacacagcttgttcacgagaagtgaagtgaaggcagattatggatctgcaggcttcaatgcaatccctctcctacctgggctgggagtagggtggttcaatatctctgtcctgctccagagcctggaggatggacctattggagccgggacagaaagggtgacaatgtctatcccaggcatgtcagggtgctggaaacagcccaactccctgtgctgatgactgagtgttgggagctgagatgctcaggtctccagcatcagggctgggttttcactcaacgtgatgggatctggacacctgggtacccagtgtctgggttcctgagattctcaccaggtcagaccaggttcctggaagctcggacttgcctcttactccttctcaacctcctgcagcatctgccaggaaaggggcctctggaattgcacggctcgccactgcccttcacaggggcattctgccccagggagcttgtctatgcccctggtgcctgtctcctcacctgtgacagccccagcgccaatcactcctgccctgcaggcagtactgatggctgtgtctgtccaccaggcacggtgctgctggtgagtccaagaaggagctgcgtgggggaacaggatggccttccttaagccagggcactgccctgctcccctcgcacccctacatggtgccctttgtccctgccctctgcccaggacgagcgctgtgtgcctcctgacctctgtccctgccgtcacagtgggcagtggtacctgcccaacgccaccatccaggaagactgcaacgtttggtatgcccagctgccgtgacctctaaccctttgaccttgtggcccatggctccccacacatcatccttccctccaccagaaggggtcggggtggtgggggctggggtatccagactggcctgggccaagggaaccctgcaggaccccaccacgctgagggctgctgagattgcctggaacctggaccagctgccttccctggatccagcccccagggccctatcctcggtgactctgtttcccccaccttgcccatagcgtgtgccggggccggcagtggcactgcacaggccagcggcgcagtgggcggtgccaggcatcaggcgccccccactatgtgacatttgacggactggccttcacctatcctggggcctgcgagtatctgctggtgcgagaggccagtggcctattcacagtctctgcccagaacctgccctgtggggccagcggtctcacctgcaccaaagcgctggccgtgcgtctggagggcactgttgtgcacatgctcagaggtggctgcaacattgaagggtgacattgccagggaggggcacacctgtatggcttcccagctgtgcaaggtgggagggggcggggttccctgtgtctgctcactgctggccagctccttactgggcttggctgccctccatgccatggggttggtgcctctcctcttggttgggactcaataccagaagcctcccagaaattaagtcccagagaagtctaatgatgtgcccaaggtcacacaggtagagaagcaaaagaagggctggacaggggagctagagagcctcatgaggatctggaggaccctttcctccaggctgggcctgaatgcctttcttcctctacaggccgggcagtgacggtgaatggggtgagcgtgacgccccccaaggtctacacaggccctgggctgagcctgcgtcgtgctggcctcttcctgctgctctcgacccacctgggcctcaccctgctctgggatggagatcaggcccctgccctccctcaaccattggacctgtgccccgccttagcaccatagggttgaactcaccccaacttctttctcccaacgcctgaccctccctcctcctggtctccctccactgagcccctgacacctccacagggcagatttccaggctgagagctaagctgacagccaggctaggaccctgagctctcaccttacttccctgcctggctggcacttgccctgccccatgcccaacccagtgccacccctacctcccagtccatgcaagaggtccgagtttccaaattaggtttttggccaggtgcagtggctcacaactgtaatcccagcactttgggaggctgaggcgagcagatcccttgagcccagggctttgagactagcctgggttgaacatggcaagactccctgtctacaaaaaatacaaaaattagctgggcacggtggtgcgcatctgaaatctcagctacctgggagctaagatgggaagattgcttgagcctgggacgtcaaggctgcagtgagctgtgatcaccccactgcactctgcctgggcaatagagcgagaaaaaaattttttttaaattaggttttcataattatctttttcatcattatgaaagcaatccttccacaccaagggaaacattgagaaaataccaagttttagaaaggcgaaatgaaaataaatctcctaacttcccatcacccatataagcagttggcttatatgttatatctaactgcttctgtggaactgagggaaacccagataacccccatatggacttggctctgagccgctgggccaccctcccagcctgccgccaccgaggctggtgctgctgggcctcacagtccatcctggagtctggtttcccagaatctgacctgatggagaatttctctccccctcagcccttggcttggtgttagttaggaaaataggctcctaattcctaccttgagccccctaaatataggtctcttcatttatcatcaccaatcatccccccacaaaagaggtaaccataccccctggtgggggtggcacctggtggtggtaaaacagaccctgggtcttctggcccagataagggctggtgaggtcacttttaaccatgctgccaccagggactcgggtcctggtgcaactgtcccctcagttccgtggtcgcgtggctgggctgtgtggtgactttgatggagatgccagtaatgatctgcggagccgccagggcgtcctggagcccacagctgaactggctgcccactcctggcgcctcagccccctctgccctgagccaggagacctgccacacccctgcacggtgagtgcaggcgggaaagcaggaagggaggttcccagaggcagggctggggagggtgtccgctggtccactgtgctggagacgccaccctgtgcctgcagatgaacacacaccgggctggttgggctcgggcccgctgtggggcgctgctgcagccgctcttcacattatgccacgcggaggtccccccgcagcagcactatgagtggtgcctgtatgacgcctgcgggtaaggagaggccaacctggagtggggtagaggtgggggtgccgggactgaatgcttcctcccacagctgcgactcggggggtgactgtgagtgcctctgctcggccattgccacctatgcagatgagtgtgcccggcatgggcaccacgtgcgctggcgtagccaggagctctgctgtgagtgtgccccgccctcagtccccaatgctaaatcctgccactgccacaggctcagcttcttgaaagagcttctcctgtcccacaagacggccgttcattcattcaagggcaagctgtgcatcgagtgcttactctgtgccagacacttttctagataagccatatatgcaagaacggctgccgagtagagctgacatggtacacgtcggcccggggggtcttgcccaaggtctacaccagacaccctgtgccctccatggtggtcaccttggccagccagcctggtgtggttgcatccttttgcccttgtgcctcagtgatccaaggctctctcctctccacccagccctgcagtgtgaagggggacaggtatatgaggcctgtggccccacgtgtccccccacctgccatgagcagcatcctgagcccgggtggcactgccaggtggtggcctgtgtggagggctgcttctgccccgaggggactctgctgcacggtgtgtagagtgacaaagggcagaggggaggggcactgagactgggaaggggccactgtgcccttttgctctgagccctgcactctgtgacctcaggaggagcctgcttggagccagcttcctgcccctgtgagtggggccgcaactccttcccgccggggtctgtgctgcaaaaggactgcgggaactggtgagtggggaggtcatcttgggggggacctattgaaggagcactgggccaagcccagcctgtggctgatcccaggacgctgtgtgctcagcacgtgccaggaaggtcaatggcattgtgggggtgacggtggccactgtgaggagcttgtgcctgcctgtgcagagggagaggccctgtgccaagagaatgggcactgtgtgccccatgggtggctttgtgacaaccaggacgactgtggcgatggctctgatgaggagggtgagtgtctttgcccatgcgtggaagcgacagggttggtcagtccttgcacatgtaactgaatttcctggggccaaggcagctgtcctggagtggcttctttagctgctgctcccattgccaggggctgcctgtggcctggagggatgaggggaagggagggtgttctggtccctctggggttcagggcttctctgggcccctacagcagcgtcctgagcctgcctgtttgccccatgctaggttgtgccgccccaggctgtggggaggggcagatgacttgcagctccggccactgcctgcccctggccctgctctgtgaccgccaggatgactgtggagatggcacggatgagccgagctatccgtgcccccagggcttgctggcctgtgccgatggacgctgcctgccgccggccctgctctgcgatgggcatcctgactgtctggatgccgccgacgaggagtcctgtctgggtgagttgtccctgccctggacgccagcccacccagcactccctcccgcaaggcccatctcctcaagagccccgacttcacctccccgctcctttgccaggttcctgctatgaagttggtcctgagggtgtgggagttggggcaccccaaacagtaagagtacagggcagtgccccagagccagttcttcttttctgtgcagggcaggtgacctgcgtccccggggaggtgtcctgtgttgatggcacctgcctgggggccatccagctgtgtgacggagtctgggactgcccagatggagccgatgaggggccgggacactgccccctaccttctctgcccacacctcctgccagcaccttgcctggcccctccccaggctccctggacactgcgtcaagtcccctggccagcgccagccctggtgagtctcctggagggaagaggtgggaaagctggtggccagaagcctgggggagaggggcatggaagcctcagagagaggcatttgtggcgctgctctgggatgggaaggagcagggcgcagtgggagacacccgaagacgctggaatgaatgaagtggagggcgtttgaaagagtctacactctttcctggcgttcaaggcctccctcccagctgcagggagtctcatggaaattcttggcccaggggagagctttgggaaaaccaaccgggcagcaaaatgcagagggattgttctcgggaaggggctgcaggtgggttagggccaggcccaggaaatggccaagggacttggaccagggaggggagcagcggcggaggtggaaggactgacccgggcgcggttgcgggtgggagggcgctcgccggcagaggatccagcgcggacgctccctgcagcgccaccctgcggccccttcgagtttcggtgcggcagcggcgagtgcaccccgcggggctggcgctgcgaccaggaggaagactgcgccgacggcagcgacgagcgcggctgcggagggccctgcgcgccgcaccacgcgccctgcgcccgcggccctcactgcgtgtcccccgagcagctgtgcgacggcgtgcggcagtgtcccgacggctcggacgagggccccgacgcctgcgttgaggctcccgcgcccccggccatgcgcggcccccctggccaagccggcgggcccacctcttcccgagcgccatccccaccttcgcctcctgaggcacaggtgggcgcggcagctagagtgatttaggtttgggggcatccgaggctgggccacgtttgcgttcctttgatctttttcgtgaaactttatttgaaaagtttttaccctcccacctaggcccaggagagcgaagaaaggggctttgtctttccccacacttggccaagaagggataagagggtgggcagaggctctgcggggatgaggagtgtgtctgtttggagggatcccgccctcagcatttccccaccagacctgagcagaccctctgtgtcactgcaagccagcccttcaggtcctgtctacctccccctatagcgagctgtccacaggccccccagctcctcccaggctggcctgtctggccgcctcccacccgcctttctgcccctctgcagggagagggcaggaagggacaggagcggagcaggacacatctcacagtgcccgcaggctccacccagctgcctctgtgccctggcctctttccctgtggtgtggctccggggctgtgcctgacccctgagcagctctgtgatgggatcccagactgtccccagggcgaggacgagctggactgcggtgaggatgctttgttccctgagggaggccccgctggctgggcccgggacacagctcacaccccccgctcactgtgttttttctcctcttctttcccaggggggctgccagccctgggaggccccaacaggacagggcttccctgcccagaatacacctgccccaatggcacctgcataggcttccagctggtgagggtgggagtgggtggaggaggcggcagtgccatgttgcctcccagcacaagagccctgaccccactccctccccaggtgtgtgatgggcagcctgactgtggaaggccagggcaggtgggcccctccccagaagagcagggttgtggggcctggggcccctggagcccatgggggccctgcagccggacgtgtgggccctggggccagggccggagccgccgctgctccccactcggcctcctggtgctacagaactgcccagggcctgagcaccagtctcaggcctgcttcacggcagcctgcccaggtgaggggctggggtggtggggcctggatagaggaagggagaagaaggccactaggccttcagccctcccccatggtcctcactgcctgccctgtccccctgcctcacagtggacggtgaatggagcacctggtccccctggtctgtgtgctctgagccgtgcaggggcaccatgacgcggcaacggcagtgccactcaccccagaatgggggccgcacctgtgctgcactgcccggaggcctgcacagcacccgccagaccagtgagttgaagagaggatggtgctgctggtgggaggccatcctctctgcagagctcccttccctgacctctgacctctgcttccggcttctctcagagccttgccctcaggacggctgccccaatgccacttgctctggggagctgatgttccagccctgtgccccctgcccactgacctgtgatgacatctctggccaggtcacgtgcccacctgattggccctgcggcagcccgggtaagggggctctgggcccaggtgctggctccagggtgtgggtctgtggcaacagccctctgcatggaagcctcaccctgggccccctctaggctgctggtgcccagaagggcaggtgctgggcagcgaggggtggtgtgtgtggccccggcagtgcccctgcctggtggacggtgcccgctactggcctgggcaacgcatcaaggccgactgccagctctgcatctgccaagacggacggccccgacgctgccgactcaacccggactgcgctggtgaggcccttccctcggggtccctagtcctctccctggaccgcccagctgcacatccaccacctccttcaggctctgactgttggccctccctcagtggactgtggctggtcctcctggtcaccctgggccaagtgcctgggcccctgtggaagccagagcatccagtggtccttccggagctccaacaacccccgcccctccggccgaggtcgccagtgccgtggcatccaccgcaaggcacgcaggtgctctgttccccacccaccgggggacctgcagggaccttggcccgcaccccacctcccacttaggaagcttcctgtgtgccccttccacatccaccacacatccccaattcggaacccctgccctgtgcccctacccgtctaaatcccgggagtcccggaacctctttggggacccctggcctttcccttctctagttttatgccctctaggtcttgaaggtgggtagacggagcccgcagatgcagcttcacaaactcagcttgaattcctgggctgaggcttgcggggggctcttgccatagctgcctccccagccccctctgggacccacggcgctggctgcagtgctggtacaaattgcttccctggccttcttctgggccagttgcaatgtctcaggtgtaggggcagagtgggctgatagggtgaccaaatgtctcagtttgcccaggacttcctcagttttatcacagaaagtcccaagtcctgggaaagtcctcagtccaggcgaaccaggagagttgtttaccccaagcaagccccgtcaccaggccagggacatccctcccttctcaggtgccagacggagccctgtgaggggtgtgagcatcagggccaggtccaccgtgtcggggaacgctggcatgggggcccctgcagggtgtgccagtgtctgcacaacctcaccgcacactgctcaccctactgcccgctcggcagctgcccccaggtgagggcactggagtgtgtggtgggcagagctggaggggatggggaggctggtggaatgggttggagataggcaggcggcctgacctctgtgcctctgcagggctgggtcttggtggaggggacgggagaatcatgctgccactgtgccctacctggtgagtgtgcctggggcatgacagggaagtcccagggggaggacaatcggcagggtctctgagagggaaccaggggcactgagcgggggtggctggataccccagcctcagggtggcaggaagcctgagttctgcatgccaagggaaggaggggacctcggggtgcgaaggcttctctctgccctccctctccgtccgccctgccttcctgtgctttgggggctttctgcctcccccatggtgccacctttgaggtgctctctttcctctgtttctgctcagatctggttgctctggttgcttttctttccctcttagaatagccaagacaaagttaagttggacttttcaaaagtatctttgcctggaaaggagttataagtgaaacgggaaaatacaaaggcttgaaatggatgcatttatgggtccaggttttccgtcttgtcttgtcttgtcctgtcctgtcctgtcctgtcctgtcctgtcctgtcctgtcctgtctcctcttcttttctttctgacagggtctcactctgacccccaggctggagtgtagtggtgtgatctcggctcactgcaacctctgcttcctggcttcaagcgattcttatgcttcatcctcccgagtagctggggttagacatgcaccaccatgcccagctaatttttgtatttttagcagagacagagttttgccatgttgatcaggctgccccattcttatcctaaaagtgcatccacaggttgctgaggttaaaacagaaccagcatactcagctgcacaggttgttcactgtacaagttagctggtgattgggacccagactccagcccacagagctgctttcatccagaggcagcccctttctaatgcccatgaaggtgcctttttggtgtcagcacccctggattaggaactgcagttgctgggtcctgggctgaaagtagtttcaggctggcagttttactctatgttctctaaatattcagtagatgtgaaagcccccaattcacaccaagggaaggaggagggacctttcccagctaggaggttgttcctgggaagtcagcagggagaaaatgctctaagaagtggggagaggcctgagtgctgggctggggactgtgagcctctcggtctctgtctcctgaccctgaagtctcctcccacaggagagaaccagacggtccagcccatggccactcctgccgcagctccggctcccagtccccagatcagattccctttggccacttacattctgcctccgtcaggaggtaagggccatgtgctatggagtgcagtgctgagaggggccatgctgcccaggggttgtccaacctgggaggggaaacaggccctcggggacatcctccttgccctgcacactgtggatggttgtcctaaggatctgggagtcatcctatcttaagttgcctctcttgactcttccctccctgggctaaagtcacccatgtggacgtttcacatcccctagctccccatgcgacttcctaaccgtgtccctgcaggctcctgccgccctctgtcctcccctactccagcctgtctctctcttctgcacccagacccctgctattctcccctggggctggccggactggctgaggggagtctgcatgcatcgtcccagcagctggaacaccccacccaggctgccctcctgggggctcccacccaggggcccagccctcagggatggcacgctggaggggatgcttatgccaagtggcacactcggccccattacctgcagctggacctgcttcagcctcggaacctcactggtcagtgaggagggcagtgcttgagggggaggcagtgatgatgggcggggggccggtgtagctccttcagctctgacctctgctcttgccctggcccctccctccccaggcatcctagtgccggagactggctcctccaacgcatatgccagcagcttctcactccagttcagcagcaatggtctacactggcatgactatcgtgacctcctgcctggcatcttgcccctgcccaaggtatcacccgcccaaggccgatggggccagcagcccaccatgcccttttgtgggttccatagtctttgtccccaagggccttccagtgtccccgaggggcatggcctgcattcgatgcttgttgaatacctggtgagtagcagggactgtgctctgtggagccgaggcttgggtgccactgtcacatggatgctggaaaccatccaagtggctcagactcagggcaggtatgtgaagcctgcaagggagagaggatggggagacaccaagttcactgagggcctccgggagcccagacccacgcacgtcttcgtggagagcagcctgggcacagccctgccctcagggggtttgcatccttcccggagacaaaccgcacgaagcggtaggaatcagtccgtgctgtgttaagtcttaactgtttcaggagcacctgctctgtgccaggtgccgagccaggccctggggacacagcagtgaacaggacctggcctttgccctaggggcacctccagcttagcgagaggagctcagtccaggaccagccccctccagccttgagaggcccaaatgcctactgccagggtggggggcatggctctgggaggggccgtgaaaactggggaaaaagtggggtcactcaaagtcatgaggtcagcctgaaaaagaggtgaagctcagtcatccgcatcctctgctggcagcttttccccagaaactgggatgacctggaccctgccgtatggactttcggccgcatggtgcaggcgaggtttgtcagggtgtggccccacgatgtccaccacagcgatgtccccctgcaggtggagctgctgggctgcgagccaggtacaggttgcgcaggggtgggcagggcaggagagagaggggccatgggaggagccctcagccatacgtcctccacacagggtccccaccggcacctctgtgcccaggggttggactccgctgtgccagtggtgagtgtgtcctgagagggggcccttgtgacggtgttctggactgcgaggatggctcggatgaggagggctgtgtgttgctgcctgagggcactggcaggtatactgtggccggccgtgcagctcacgcccttggcctggcctttgaggggacagccatgtgggaggggcccggcactgccttcacccccaaggtgcccagaccctgcatgctgaggagctgcagccgggtgccttcaaggccctttcccacctggattctaggattccctgcctttctcatagttgagtcaggggttctccaggtgtgggccctggaccagcagcatcggcagcacctggagcttgttagaagggcaggttctcgggcccgcccagacctgcaggggtggggtgcagcaatgtgtgtcttacaagcccctcaggtgattctaacccatggtcaagttgggagctactgttgggaacatcgcctttgtccagcctcagtgggcagagtccttcctgaatgctcactcccgcaaagaccccaggcccagcaaaagcacactgacgcccctgcctggaaggggggcactggtgctgggagggcccctggagtccttttggctatttttctccccagattccattccacagccaagaccctggccctctcctctgcccagccggggcagctgctgcactggcccagggaggtgagtgtagagccttgggcccagagggtggagtggggggacggggacctcgcctcacagcctcaccagccctgctcctgcaccagctggcggcgtctcccctctccgcagcatttcctcctgtgtgttccctggtactgctctcaggagccttgccggtgcctggctgcagagacgtgcaggcagagcgagggcccagaggggtttggggacaagagaagcctgcacccctgatagggagcttatgcccacggggcaggcaccagggcatctggtgctcagagccgaaaagagccctgtgcccgggtccccaggggcttcccggacaagacttgagggctggagaggggtgtctatagtgtggagaaggcgcggagcaccttcccacctggaatggcctggtcagcaacccagagtgtgtgggtggggtagggggtagggggtggacatgtgcattgggtgggggaaggggagtttgaggggcaagagctgaaatggatcaccctggtgggctgctgagaataaggtccctgagctccttgagggcagtgggctggtgcctggaagcgcagttgcgtgctcagctctgccctgggctgcgggggaggaagatggacaggaagcagtgctgggactgtgagcgcccaggctgtatcctcaggggatgggagctgccctcagggccgggggctgtgcagggtgctgagccctctccctctgcagggcctggcagagactgagcactggccccctgggcaggaatcccccacgtccccgacaggtgtgtgcacagactccaggcctcctccccaaactcttgtcccacctgttcttccagagccaggggccgttacatctcaggggttcaaatcccatgacccctgacttccccacaaccaagagagtcacggggttggctcagggaggagacactggtcactttggacatggccaggtcctgcccctgcccaccccctgggattccaaggtatgtggctgtaggttggcggggcaggtagctccaggccagctcccaggactgagcctgtgccctgtaatgtggctgcctctccagatgcctggtcaggacaggtctcccccatgggggtgggaggccacttggctccagcctgcactctctctgctcaccatccatggagccaggcccccctttctgaagcgtttgctggcatcaaatgtctcttaagtgggcacgggggttggatgtggtcaccaagttggcatgctcctatataaggaaggaagaggctctgcctggttgtgaaccggcctccctggagctacctgattattcacctgtgtgctagccagcagagagctgcctcctggagggcctgctgtcctgcggggatgagggggtggtaagagggcttttggtgtgggtgaattcttgccctcatttctagcccctatgggagggatctgggtgaggcttggggcagcaggggctggagaggaaggagggtgagggcaccaggtctgctctttcattctggctcatcctcccctgggcctcagcttttccccatctgtgacactaggaggccttatagacaactgtggcccctccctgtgagttctgatggaagttattcagaacctggccggactgtttctgtgtcttttgtgaaaagcagacaaagcaattgatgccacccctcagatccataacatgcagacccatgggatacattataatttcattctcagtctggttaaaaaaaaaaaaaaaaggctgtctttgaatgcatctcttgccagaaaatgagacttttaacccttttcactgtagctgccaggaagcccaaaatcagtttgttgttgttgttgttgttgttgttgtttgtttacaacagaaacaatgaactcaccctgggtctctggtagtgtttactccctctgctgctgtgttaaaatgacctcagttctttgtctccctaaatatcgtattttatggtgagtttgaacttgaaagttgccatgtgtttcttcttgggaatagaataaaaatctcagatcaaaacaagtcttctactttcagccaaagcccttcctgtgctccttggatttttttgatgcaaggcctctcagaaggcatcaattgctttgtctgcttttcacaaaagacacagaaacagtccggccaggttctgaataacctccatcagaactcacagggaggggccacagttgtctataaggcctcctagtgtcacagatggggaaaagctgaggcccaggcaggtggcacggtgaggcccaggggaggatgagccagaatgaaagagcagccctggcaccctcaccctcctttctctccagcccctgctgccccaagcctggtccgcagcacctgtgatttactctgcaccacccagaagcctgggataccctctcgagggcccccaccttcctttcctgggaaggggagctgggcaagcctcacctccctctacctacacccacagagacaaggcccgtgagtcctggcccagcctccggggtgcctcaccatggggaatctgtgcagatggtgaccaccacccccataccccagatggaggccaggaccctgccaccaggtatggcagctgtgacggtggtgcccccacaccctgtgactccagcgacccctgctggtaagatgccaagcccttctacctgtgtgcaaggcctctgtaagcccaccttccttgtgagggggacagaggccctttgttcaaggtcacacagctcaaggtcattttggggaggactgagtttcctagcccagtttaccctttttctattatcccaagataggcagagtgaggcatagcagatgccaagaggagggagcttgggggcttcagggaggtgacgaaggagaaaggacagggcaggccaagtgactggtcagccggctgtggtggtgcccacaggccagagcgtcgccccaggacccttcccacctgtgcagtgtggccccggccagacgccctgtgaggtgctgggctgcgtggaacaggcgcaggtgtgtgatggcagggaggattgcctcgacggctccgacgagaggcactgcggtgagctgctggagggcctgctgtcctgtgggtagggggtggcacttatccttcagtgtaggaaagtgtctgccctcatttgtagctcatattggaaaggatctgggggaggcttgggcagcagggaatggagaaaatgggtaaaaacaggagtgtgtgtgtctttgggggtggtcaagaccgggaataggataggccttgggtctcagcctattttataaaacctgtttgacctttgaagagactcatctactcactcacccatccaacattctacctatccctctatctatccatccatcaaccacccatccatccgtctacccatcctcccatccactaatccacccactcacccacccatccatccatccacccacccacccacactcccaccccccaccccccaccccccacccctctatccatgtattcatcagccacctatcaaccatctgtctactcacaaatctatccatcaatccatccacccatccagccagccaccatgcatctatctacccatccatccatctattcacccgtccatccatcaatccatccatccatctcaatccacctacctacccctctatccatgtactcatcagccacccatccatccatccatccacccacccatccatccacccatccatccattcatctatccaccgacccctctatccattcatctatcagccacccatccatccacccatccattcatccatccatccgacacccacccatgcatctatcagccacccatccatccacccatggattcatctacccacccctctattcatccattcatcagctacccatgcatccacctactcactcatctacccatccatccatccacccatccatccattcactcacctacccatacacccatccatgcatgcattcatccacctatctatccacccatctatccatctacccacccatatatccatccattcatttattcatccatccatccatgcaaagtagatcactatgatcaaagcttagtcttccaatcatgaccaaagaaatccaatgttaatcagtcacaagaagagccaccccagggagtatgcattcaggaataaggtacctaagcatctagaatctctgtgtgagagcttgtgtagacccaagactccatgatctcaccaacacatagtggaaggaagcctgctctgggcatgggatgcaggaggcatcaggaggaaggggaggccaggggctccagtcagcaagctcactttggctcttggcttgagaaggggctgagtgtatcattcagccaggaatctacttatgtggctcccttctctccctgccttgtgggcagcgagcactgtgcccttcatgatgcctaccatggccctgcctgggcttccagcctcaagggccctctgttccccgagccagctgagctgtggcagcggggagtgtctgtctgctgagcggcgctgtgacctgcggcctgactgccaggatggctcggacgaggatggctgtggtatgtgccagccagggcaggggtagccctgagggccccctcctgcatgagcccctctgagccccggcccccatgcccctgcagtggactgcgtgctggccccctggtctgtctggagcagctgcagccgcagctgtggcctgggcctcaccttccagcgccaggagctgctgcggcctcctctgccagggggcagctgcccgcgtgaccggttccgaagccagtcctgctttgtgcaggcctgcccaggtaatcctgcactccagccttccctcgggaaagcccctgctcccagagggaggtggggaaccccccacccagtctcctcaggaaccttcaggtgtgaaacctggggtgggtttccatctgagagcctcccggctggccctgccctcctttcctacctgagccaagactcaggttcttgtgtatagcctggaaataatggtcattcctgcctcagaaggcactggaaggattaagggagatggtgtgtgggggtgtttggagccaggcctcatgtgtcagccagctgtgccacttgtccctgggtgccatgcggaaggccttgtcactcttttattccatcgatccaagggagtggccctcacctacttctgtgcatggcagagaggggcttcccacacaggggcctctttcagtcccaccctggctcctccctggctgtggtggccctacagctgccatcagggctgctctccccaggatccctgcagtcccggccccttcccagggagcagagcttttgtcctgggaggcacctagagccctttctccaggcacctgccacctaggggaggtttcctgggacagaagaggagctgtggaacacccagggcagggcccttggctgcctcactggctgctgcccaggccgggggaggaggggagcgctggctctggccactctctcatagcctgtgtctcctggacccctcctggtggacccacatgctaccttccccaacagtggctggggcatgggccatgtgggaggcctggggaccctgcagcgtctcctgcgggggtggccatcagagtcgccagagaagctgtgtggaccccccacccaagaatggcggtgccccctgccccggggcctcccaagagagggcaccctgcggcttgcagccctgctcaggtggcacaggtaagggggtgctgggctggggacacggagggagcactgtgggcacggggcgattgggcctcccagcacctaggctcacctggtgcccatcccccaccagactgcgagctgggccgtgtgtatgtgagtgccgatctgtgccagaaggggctggtgcccccatgcccaccctcctgcctggatcccaaggccaacagaagctgcagtgggcattgtgtggaaggtgaggcagacctggcctgcagggggactgtgggatgcccacacaggcccaccagcccccagtctccagcctcccctccctgctgtgccccttggggctgagtgccctcttccacatactcccaggatgccgctgtcccccggggctccttctgcatgacactcgctgcctgcccctctctgagtgcccctgcctggtgggcgaagagctgaagtggccaggggtgtccttcctcctgggcaactgcagccaatggtgagggcggctgcaccagggagggcactgtaccggggtctccccagccctgaccggttcctcagcctctccctcccctgcagcgtgtgtgagaagggggagttgctgtgccaaccagggggctgccccctgccctgcggctggtcagcctggtcctcctgggctccctgcgaccgctcctgtggctctggagtgagggccaggttcaggtgtgcgacaggggtggacggcagtgtgagaaggagtggtggggcccagggaggcgaggagccaggccagccctgagggggcgatagtggaaagatggtggacaggggatgaaggatgaagaaggcgggagtgagggcagggagagagcagagcgggtgctcagggctgcctctctccccaggtctccctccaaccctccggcagcctgggggggtgccccgtgtgaaggtgaccggcaggaactgcagggctgccacacagtgtgtgggacaggtatagccgggagcctgggtgcaggagtccccccttcctcctcccaattctgtaccctgagaacacatgggatgggacccactgaccactctacgtgggggattggtaacacctccgcagtctgagaggcagcccttgaactggcctcggtggaggggctttgatggggagaggcagagactcccgcccagactgcctgggcgccaggagcaggctggcctgggtggagcaggcaactgcagagccgggcgagagaggtgaggctggtgggttgagggaggccagcagcaacatttagaggccagatgaaggtgccagatggtttccctctttccacctaccgggtgcttctcagacagtgcctgtgccagtggaggtctctgcagagcaggcgcagcctcactgttgtgcagggcaatgggacgaggtgggcaatgggacgaggtgggcaatgggacgaggtgggcaatgggatgaggtgggcaagggagaggtgggcaatggggaagaaagaggagtgggggaggggagggggagagaggcagggtgcatccagggggtctgggccaggctcttgcagtaggagggaaagaggggccagtggagagtggccggtgggacactgacagtttccacagggactcttaatcagtttctggcatagaaggatcaggaagcgttgatctgggggaaacatgaggattggtggtggtcctgctgaggtgctgtccgagtccaggagagagatgtgggaatgtagttgagcccaggttcacaggaggctctgtgcctggctcctgagggtgagaagtggggctggaggccaggtgcagtggcccacgccgataattccagcaccttgggaggccaaggtgggaggattgcttgaggccaggagttcaagaccagcctgggcaacatagagagaccccatctcttaaaaaaaaaaattaaaaatgtagctgggcatggtggcgcatgcctgtggtcccagctcctcgggaggctgcgataggagatcacgtaagcttaggaggtagaggctgcagcaagctataagcatgccactgcactccagctgacagatcctgtcctcagccccccagaaaagcagaaaaaagatggggctggagagtgggggtcccagcaagtgagctgagaaggggcagaggctgcaccctgagcccagagcagcctccctcctccttgtgagccctcttctgcccacctagtttctcagacctaacccaggctcctcgaccctccccagccctgccagtaaaggcctttgcacaaatggcctgtcctgttccccctccacagaggtgttcggctggacgccctggacttcctggtcctcctgctcccaaagctgccttgccccgggagggggccctggctggcgcagtcgttcccgactctgccccagccctggggattcatcctgcccaggagatgccacccaggaggagccctgcagcccccctgtatgcccaggtattctcccttgggcccaggggtggctcggatgctggggtgggatgaggagcaaagaagaatgcccccttgagccggttctagacatctgggaggggccaagggttggagcaaacctggctgttgtccttaagcctctcccaccccagccatcgcgcaggaagccagcctgagtggtagacgtaggtgggggctggaggctgcagttaagaccctgcaagctacacagctccagccacacgatgccctatcctggactgtttctgccatgccggtgtctgtgactctggattgggctcttcctggcagtgccaagcatctggggtctgtgggctccctggtccacttgctcagccccctgtgatggaggcatccagacacgtgggcgcagctgctccagcttggctccaggggacaccacgtgcccaggaccccacagtcagaccagggactgcaacacgcagccctgcacaggtaccagactccctgcctattttccagcaggcctccctggcccagctcctggggattttgaccttttccccaccctcaccttcgcccatcactgccctctgactccaggccaggtaatgcctggagctaagggagcctgggatttcctgtgtctcctctagctccctgcctctcccacctgccactggggaccaggtcccagcagctgtggcccctcagccctttgctcttctttggtggaggcaggcctccttccccagagaacaggctccccgagggaggcagactggccttcctcagggcagaacacactcagggccagaatcgtgggggagcagagctcgcactttgaagcccctggccccttccttactctcccttgtcctctgagggctcctcctatcccagatgactggagtcctcatggtctgttctcaagaatatttgtattaaagtagagcaaagccatggctgtgtcctggtgccatcccagacactggagcaaagctgtgagggtaggggcaggaggggtggcttctctggcacagtcctgcccagtagcctgccgccccatgccctgcttgcaggttcccttctgcccctctgcctcccttcccttcccatcccttcccgtccttcctgcccttgctgagacctgctttgtcttcctatccagcccagtgcccagagaacatgttgttccgctcagcagagcagtgtcaccaggaggggggtccttgccctcggctatgcctgacgcagggccccgggatagatagagtgtacgggcttctgcgcccccggctgcacctgcccccctggtcttttcctgcacaatgctagctgcctgccccgcagccagtgcccctgccagctgcacgggcagctctatgcatcaggagcaatggctcgcctggactcctgcaacaactggtgggtcacagcgtgggggcagtgtgggagaggggccggggatctagaggtgggcaggcgtgggctccctttcacaagcacaccccgtggtggggtgctccgttccccaaacacaacacagcagccacgggtgccgggcagggtcctgagaatattagagcgagtggtcatccccatttgacttatgggaatattgggtctcagatcgatggagcgatttatgatagaactagagatggcagagggtctaacctctcatcacagctttctctggttctctttcctgaatgtaatttcatacctgggatccacttgatttctgttcagaaacattcaagtgcccagtacccaaagctgacatcaggatctgccagcagagggtgctccaagcgatttccctcttttttctttttcttcacttcatttccttcattctttttttgtttgtttgtttggtttttttgagatggagtctcactctgtcgcccaggctggagtgcagtggtgcaatctcagctcactgcaacctccgcctctcagctcactgcaacctccacttcccgggttcaagcaattctcctgcctcagcctccctagtagctgggatgacaggaacctaccaccatgccaggctaatttttgtatttttagtagagacggggtttcaccatttggccaggctggtctccaactcctgacttcaagtgatccacctgcctcagcctcccaaattgctgggattacaggcgtgagccaccgcgcccgggccattcttcatttccctcttactttttactttatataccctgcccctccttcgatttcctccttctttattcttcctcccgcctgtgctttctttctcacttttcgtctctccgatctttttctgggacctccagtatttaataaataggctttaaaacatgtattggagagaacagcaagtgtgcagaagtacccagttctccctcctaggagaactccagctgtctctaaatccctcctacctggccctggccctcgaggtcatttcccaataaatacaaatggatgagaccttgggacaaaggacagcgcagcgcctgggcgctgtggggctcactgagggtgcatcgtgaacttcgcaggggacctgggcagcaagcttcacaccccagaccctcgggtttgtcttctgcagtggtctcagctgcttccctgggggtaagggctgactgtggccgtgatggccaggtaaagcctcactaccccctttctctgcagcacctgtgtctctggtaagatggcatgcacctcggagcgctgcccaggtacccccatgcttggggcacgggaattgggcagtggtgggtcctcagggaccataggggacttaggaccctcctgagttaaactcctgggagctcggtggtgcccagggaagttagggtatgagaagactgacctggtttcacacacactgccctccgcccccaacacgccctggcagtggcctgtggctggagtccctggaccctgtggagtctctgtagctgcagctgcaacgtgggcattcggcgccgcttccgggcaggcactgcacccccagctgcctttgggggtgctgagtgccaaggccccaccatggaggctgaattctgcagcctgcggccatgtccaggtgagagctgggactgaggtcctgagacctccttaaccttccagagagaagccaagaagactcccatcaccccccaccctgaacctctagaaaagtgcaagagacttcattaagagatgctgctaagaggttgtccccagagactccttgagggtccattccctaacagggcccctcctcagaatagccccagcttctccctagagaccagcccagttctaggctgaatcctggagccccccacaagcaggtgtgaggcaccttaagtgggatatgacgctgcaggtgaagcggtggaggggtccccaggggtgtctgggtgggaggaggagaaggtggggtgggcatgggaggcagggcctgcagtgacctgggcaccacccccaggtcctggtggggagtggggcccttggtctccgtgctccgtgccctgtggtggtggctacaggaaccgcacccgaggcagcagctgcgcagcctcatggagttttccacctgtggcctgcagccctgcgcaggtgaggcctgccctggggaccctccagttctcattcttaccaacccagggcactgtcaaccccctgtctgccaccccagcacagccctgtccctcggcccttgtgcagtccccatgaccaccccacccatacccagagctggtgcctctcccaggttgggagctcaggggagagctgagtgctctggggctgggctgtcaatttctatgtccccagggccagtgcctggcatgtgtcccagggacaagcagtggctggactgtgcccagggccctgcctcttgtgcagagctcagcgccccaagagggactaaccagacctgccaccctggctgccactgcccctctgggatgcttctgctggtgagtgtccccctgcctggccccagagaggcctctgtacagcctggggaccatggggtggcagggaagggacaggcaggatctggacagcgaagaacatagggtatggggctagagacagggagaccctgcaaggttgaggaaagggtactaaactcatgggttacaactcagctccggcaggaaccagcaggggatcctgggcaggtctcatccctctccccctaatctctgtttcctcactggtaaaaatggtgataggtctagaagatctttgtgaattgtccctgctcaactgctctgtccactatgttatcaccagttatttatcgagcacctacagtatgttagtctctggctgagctattctgtagggaaggagtagtctctgccctcaagaagcatccagtctggggaaaccagacccagagtccctaaaatgaagctagaaccatcagacgggcaggaagtgagctttgcacattgtggagtggagtggagtgggctgggtcagccatggagggctccctgtaggaggtgatcctgacttgaatatcagagattggagggtgtggagagtagggaggcatggagggcttcctgaaggagggggtcctgcacttgaagatccaagattggagagcagagaggtggccactctagtcagagggtggtaggaattggggctaggaaatgccggctgtgtggtgggattgaacaaagccgtggggtgtggttaagggacacgttgtaatcatatctgagtccaaatcaggctcttttactggtagccctgcgagcttggggatagtattcccgtgcctcagttccttcctttgtaaaattggggtaaaattacagccagtcacaggagtcagtgagacggtgcagggaaagggtttcccaggccctggcccgtaaacttcagtgcgttcgactttgaatcatgcgccacaagacagttgtttcttttaaatctgaaggacttctgtccagattccctgtgcacaatgtttttctgtttttattttgttgatgaaaatgtgtcttttcctaccattgctgtacaaattgcatatttcatgttttcatggctgacttcatggggattcgacagttcagtctcatgtcctgcaatttttaagatggtctttttctcctagaaattggagggtccacgtccccacgtccccacggcccccaagccgatggtccgcatttgcctggcaggagggcagaggggagagctgcatgtctgtggaaggagagtggctgggttttaagggggagcttgaggattgcatgctggctctgaccagggtggggagcccaggcccagcccatctggagccagaagatgatagagggtttcgattccagaacaacgtgtgtgtgcccacccaggactgcccctgtgcccacgaggggcacctctaccccccgggcagcactgtggttcgtccatgtgaaaactggtgagacaccgcccccatcccattatggccctgtgacctctgacgacctgctgtccctcctcagaggcagggattttggctccagtcggggacagagacacatgtgccccccacccccagcccctcggcacagccgtccagccctctgaggctgcaccctcctgcgcccctccctccccctgtcccccacctgttttccctctccccacctgtgttagcctcctggggctgctgccaccgagtgccatgcactggggagctagagcagcggcccctgatggtctcacagatcctggaagcccaggatcaaggtgttggtgggtgggctccttctgagggctgcaagggagactgttcaaggccttactcctcttctgggagtttgctggaaatcgttggcactccttggcctgtaggtggccttctccctatctcttcatgtcatcttccctcattttctcttttataaaggacataagatgcattaaaactagggccacctcagtgacctccttttaacctgatcacctctgtacagacctcatctccaaataagctcccattcccagggactgggggccaggacttgaacttgagggtttggggggccacaatgcagcccatagaccaaccaaccctctgctgctccccacagctcctgtgtctccgggctcatcgccaactgcagctcctggccttgtgcggagggtaaggaagcgtccccacttctgacttgcacctcggctcccccatccctcagctgcaggagtgggccagggctgagactgggggaggaaagccatcaggagagatggggggcagaggcaccatgctccatcttcagcctgtccagcctgtgcctgtccccctcctgcctgcccgcctcctggatatcccctaggtgagcccacgtggtcaccctggaccccttggagccagtgttcagcctcctgtggccctgcccggtgccatcggcaccggttctgtgccaggtcccccagtgcagtgccatccaccgtggctccgctgcccctgccagccacccccacacctctctgctcaggccccgaggctgaagaggagccatgtctcctgcaggggtgtgatcttgagtgcctgcctgccctgcccgcctggaccctcctggggagcccagggtggtgcccactgtacgctgtggatgctgctgccttgtaccagctgtgccctggccccagccaagcccctcctcactccttcctctgctgtgtccccaggagctgggggatggggtccatgggggccctggtcccactgtagccggagctgtgggggaggcctgcggagccggacccgggcctgtgaccagcccccaccccagggcctgggggattactgcgaggggccacgggcacagggggaggtctgccaggctctgccctgcccaggtacctgccagggatgggggtgggggtcagggacagaggaaggggagttagaggaagcattccagggagagaggccagggtggatggccccacacagttctcagcccatcctgtttgccctcagtgaccaactgcactgccattgaaggggccgagtatagcccctgtggccctccgtgccctcgctcctgtgatgacctagtggtgagtcccagctcccttggcactgccacctgacccaaggcccactttgcgggagggcagggtgtggatttgggctcacggcctctttggctggggcctggacagcccagcacaggaaggcacgggtgggggccctggtttcagttcacagagcatgccaggccaccccagagagacaccagcctctctccgcacagagccagcctcacctgacagcctttgtctgtagatcagacatttctcacattaaagtgttatgacaaaaatggcataaacacaaaggaagggggaaatcatctcctgaaccccatgagcacgttggtgtctagacctgcatctgtgtgtgggtgggggagtggcggggggtgggagaagcaaacacagggtcaccacggagcccacattctgggctgagcaagacagacacacgtgaaagagtggtcacagtaggggccatgaagaatgaggtggggcttcgaggccttgggtgtggaggtgctgagggaggtggggagagggaggagaaagaggaggatctcgaagagaagagaaggtcgttgcgggcagtgcctgctcccagccgccccaggacctcccagctccttcccaaactgcccccttgcccagccagctccccacgttctagaggtctggggcatgccccagcttccaggccatgagtccaggtcacccgctggaattggggttttacatctgggaacacctagctccaaatccctgccccagggggccaaagggaacctcctcagctgctcctccctcccctccaccctcagggaggggccaacctcagtgcaaactgcagggctagctgggtccccttcctgcctttctcatctgcactaccaggcgtactctgttgaaaacgtgaggcctctgtcacaccttcctccccagccccttgttccgtcgtcttccctgcacagctttcctttttctgctgatggcccccacttactgtcccccagcactgcgtgtggcgctgccagcctggctgctactgcccaccaggccaggtactgagttccaacggggccatctgcgtgcagccgggtcactgcagctgcctggacctgctgaccgggcagcggcaccatccgggtgctcggctggcaaggcctgacggctgcaaccactggtaaggggccctcgccgtggtgggaggcagggatgccagcaggagttgccccacttcatcccattctctcgagctctctggagtctccgcggatggtcacatttgccccccacaatccctgagcagatgtggggcaggcaccaagacccgcgtctgataggcgaggacgctgaagctgaccctgtgtgtctgcgggggctgggcacgtgctcagcggcaggaggggtctgggcaggaggagtgacagatatggcattcacaacccatctgaccacagagttggctccagggtacctgcagtccttccccaagagtaggcatcatctggtgaccccgagagggccagctaagtgggacaggaaacaggatagggaggcactggagagctgggagatggggcactatctggcagaaaactgaggatcaatcataaggatgaggggaggggagaggcagctgggggggtgcagagttagggtttggggtaggactaagctgctgcctcttccttctgtgtctgcaccccctgcccagcacctgcctggaggggaggctgaactgcacagacctgccctgcccaggtatgtgcctagcttggagggaggtgaggaggggggcctgggaccgggcaagggacgggctgcaccccagtgcccaccattctccttgtagtgcccggaggctggtgcccgtggtcggagtggacaatgtgctcccagccctgcaggggccagaccaggagccgctccagggcctgtgcctgccccactcctcagcacggtggtgccccgtgcactggagaggctggggaggcaggggcccagcatcagagggaggcctgccccagctacgccacgtgcccaggtgtaatgccccacgaggcccatgcccctcccccaaaaggccctaaagccctgctccagccccgctaacctggggcctcctaatgcggatgatctgtcttcctgccacagtggacggagcctggggcccatgggggccatggtctccctgcgacatgtgcttggggcagtcccaccggagccgggcgtgcagccggccccccacccctgagggagggaggccctgccctgggaaccacacgcagagtcgcccttgccaggaaaattccacccagtgcacaggtcaggcttcagtgaggtctgagagggcccctctaagtccagggagatgccgactctggcctctgacctccacacacatcatgtcactatctcaagggacagttcccaggccatcagtcatggacctggtcaaggtggcgggtccgaatgggcgccaggcatggcaggagggttgaaaatgcctcaggatgcccttcggtgaccaccctctctgctttcttcctgcgtagactgcgggggtggccagagtctgcatccctgtgggcagccctgcccccgctcctgccaggacctgtcccctgggagtgtgtgccagccaggctctgtgggctgccagcccacttgtgggtgccccctgggccagctctcccaggacgggctgtgcgtgcccccagcccactgccgctgccagtaccagcctggagccatgggtgagtgcctcccctctcccccagcccccagcactgcagtgccacctgtctggcccctgtgccgctgccccggggacccagcctggggctgcagaacaaaaatgagcgattaccagctctccaggccttcgtgtccctcgactcccctcccagggctggtctggttggagtgtccacctcccttgttcaggacacagggtgccatgcggtggaggcaagagggtggggagtagaaggccatggggtgggaggagggatggatggggggagctgagctgtctggagcccccaccctccctcctgtgcccctcagggatccctgagaaccagagccgctcagcagggtctaggtttagctcctgggagagcctggaacccggagaggtggtcactgggccatgtgacaactggtaagccaagagaagtgggggcggggaggcgcatagaacccaggaggggagccctcaggggatggggctggtcctgtctctgaagccccctcctttgtccccagcacctgtgtggcaggcattctgcaatgccaggaggtgcctgactgcccggaccctggggtgtggagctcttggggcccttgggaagactgcagtgtttcgtgtgggggcggggagcagctgcgctcccggcgctgtgctcgtcctccctgcccagggcctgcccgccagagccgcacatgcagcacacaggtctgcagaggtgagcgccagcccggggctaaccccactctgacctttgagtcccatcctggcctttgaccctgactcatgggtgccttttggcctctccctccccacccccacctgtcctccagtgccctcccaccagcgatggacaagtgaaggaggactcagccaggctgtgggagcctgtgggagggggcgctgcccagggcggggggatgggcaggtgaaaggcactccctgaggtggtcagtgagggccggggccggagcaggtgctgatgtggctgctgcctcagaggcaggctgcccggctggccgcctgtaccgtgaatgccagcccggcgagggatgccccttctcctgcgcccacgtcacgcagcaggtgggctgcttctctgagggctgcgaggagggctgccactgccccgagggcaccttccagcaccgcctggcctgtgtgcaggtcagaacctgtccaccccacagccctccctgccctcccttcgcctgtcccctctgtcatgtctgtcacttttgcagaccctgtcatccctgggcaggcccctaagcagcacacaggctggtgaggccagccgaggcctctgctgacagcgtcaggggcaggcagagttagacgcagcctcccggggtccctggttccccgggatggggaacacctgccacctctggacttgcctgtcctctgttcctgactggtacatgtcccagccctgctggagctcacacccacccctgtattccccgcccacccctcaccctggcagggaggggcagtttcctgccaggttcccatgttccccaacctcactggcccagcctcacctccctgtcctccactgtgggtcatgggtcttcactgcccctctcttgcctgtcacatgcttgtggggacagtgcccctcaccttcactccccttggccccacctggtccctgctgggcatcccagcggcagccggggcccagctctgctctggggagcctgacaggcacacagggatccctttcctaatcctaaagccggctgcccagtggccactcctgagccagagttccaggatgccatgttcaggagggaccagagcagccacctggtctcacctcctagacctagagatggtgacagtgagccccagagaggggaggggacacaccgaggtcacacacagcagcagagccagacccaaacctaacgtcccgattcctggctgaagctctttctgccccccgcatcatgtgtgagcctgtgagggtctgtgttggtgcctccttgtgtcctgctgggcgctctgtgtggggaagccagctcaggccaagccccggccatgcccctctcatggtgtgctcatgcccctgatgggggtgaacagccccctgctcctggaaatgctttcctggagcctggagcccttttccgggtcctcacactgtccctccccaagtctctccaggggatgcgcacagccccgggtgggtggctggcctgtgctgtgatgctgcctcctctgccccactctcccaggagtgcccttgtgtgctgacagcctggctgctgcaggagctgggagccaccataggtgaccctggtcagcccctcgggcctggagatgagctggactcaggccagacacttcgtacaagctgtggcaactggtgagggggatggtgagggtggggactgggctggggagggtcagggagattttcagtggagggaggggttagagggtaagaggacagggaccgggaaccccagtctaccctctggccccacctgggctgggctaacctggctcttcccccagctcgtgtgcacacgggaagctgtcttgctccctggacgactgcttcgaggccgatggtggtttcggtccctggagcccgtggggcccgtgctcccgctcctgtggagggctgggcacccgtacccgcagccgccagtgtgtgctcaccatgcccaccctcagtggtcagggctgccgtgggccccgccaggacctcgagtaactgccccagcccagactgccctggtaaggacaggcagaaggtggtgggcagggctggggtcaggatggcactggacagacgtctaggaggccttattggaggaggcagtatctgaggggttttgagggagggagggaactttgaccagcattggaaggaaaggaacagcttgagcaaaggccttgagcctgcaaggaagtgctgtgcttggggcctgggtgtccgcaggagctcaagctgaggaaggctggactagatagccatgagcccgcagtgccagctgccagccttaggcgtggtcccggtgcgctgtgggtaccaaaacatttctgagtggggtttcctttggcacaggggctgaagggtccacggtggagccagtaacaggccttccaggtagctccagactccctgtacctctgcctcatggcctccctgtgggaagagcaagcccagggacccctccccgcttccccctcccctgcttcctggagaggctgaaactcagggccgactcagcacaaggcaccctccccaatccctcccccaggtggctggggcccatggtcctcctggtccccctgctccagaagctgcacggaccccgctcgccctgcatggcgcagccgcacccgcctctgcctggctaactgcaccatgggggacccattacaggagcgcccctgcaacctgccctcatgcacaggtgtgccttccagcctcaacttctgatcccagccaccaccctcagacaactcattgtaacccccaattcccaatatctaatacccctcaggtaatcattggtttctagtgttgacatctcatttcaaatcagtgtctgactccgggctctggatcctctttgccaaccccagcagatgctggggagcccaacttccagcacattccttgttctctggtgtgtgtgctgaactctccacccgccccaaggtcccgcccaaatccctccatagccctgtagtctgggattactgtccctgatgagaaaaggggatagtgaggcccagttgtcaaagccacacagcagtcagtgtcagatccagaatgagagcccagagctctggacgaggccactgctggcctgggtggtggaggtccaccgttgagctgggagcagagaggaaaggctgggcaggtgtcatgcagccgggactggctccagctccgctttgtgtcacagagctgcccgtgtgccctggccctggctgtggggctgggaactgttcctggacctcctgggccccgtgggaaccttgctcccgcagctgcggagtgggccagcagcgccgcctgcgggcataccgtccccctgggcccggcgggcactggtgccccaacatccttactgcctaccaagagcgccgcttctgcaacctgcgagcctgcccaggtgaggcggctgggggagaccagggcatgccccaggctctgcccctggaaggcccctggcatcagtgccccctcccaggcacccagcctacctgagtgtggcactttcatctctcacaccagaccctgacctgggctcgtgggataggtgggggccccctgcctgagccgacccctcaggtggccgttctctttcccacagtgcccgggggctggtcacgctggagtccctggtcctggtgtgaccgcagctgtgggggaggccaatccctgagaagccgcagctgctcaagccccccatccaagaacgggggagccccctgtgctggggagcggcaccaggcccgcctctgcaatcccatgccttgtggtatggcaatggtgacagtcctgtcctacccttattgggctccactctgcatggggcctggctgctacctcatgggccagtttggaaactgagccctctggggtggagggctgggcctggcgttgggcaaggataccctgagcatgtctgttgtctgtgccaaggcccaaggatccaccctggccaccccaacccacaggagagctcctcctttcagctttcccacccccgaggtgggaaagagccaccagccctgtcacaatttttggaggctttgacagtggcacttttaggagcggctgtggcactcgtgggtggtggatggagccagcggctgtagctgagcctgtgcctcctcccgtcacccccaagcttcagctccttctttaattggccctcaacagccccatggcatgggttcccccggggctcccctcctctatccccacccatcctctgggtggacacaaaagaggctccaggtgacattattggcttttgagacccacaaatttagtccagctccacaaacatttactgggtaccgggtaggtgctgagaactcacaggaggtgagaggaactcactgtctacctagaatgtcccaattccagagtcttcccgagtctcccgtgtttcagtgagcaccagtgtgggggatgggatgggtcctgtagctttatggaggtagggagtccccagtagggcagagggagggtttctgagccctgggccctcctgactctgggccctccatctgctcagaggccggctgcccagcaggcatggaggtggtcacctgtgccaaccgctgcccccgccgctgctcagacctccaggagggaattgtgtgtcaggacgaccaggtctgccagaagggctgccgctgcccaaagggtaggtgctgccctatccttcaggagtgtcagggtggctgagtgggaaggtgtgggtggggccaggggtgcaagctccagcccttgccccacagggtccctggagcaggatggtggctgcgtgccaattgggcactgtgactgcaccgatgcccagggccacagctgggccccggggagccagcaccaggatgcctgcaacaactgctcatgccaagctgggcagctctcctgcacggctcagccctgcccgcctcccacccactgtgcctggagccactggtcggcctggagtccctgcagccactcatgcgggcccagagggcagcagagccgcttccggtacggggctggcagggctagatgtcccttctgccacccagggcctcactctgcaaggcgcagtctcccttctgacagagttcctgggtcctgctctcaccagcgacagcaccaccccaggccctgggccagctctgtccctggttaccctggcttttcctcagctacccccatgcccaccctgaggtgtcccgtcagggtgtctcatcaggagacagagaagggatgacgggcctgagctatctctcacctcctctgccctggccccacccaggtcctccacgtcgggctcgtgggccccagagtgtcgggaggagcagtcccagagccagccctgccctcagccctcgtgcccacccctgtgcctgcagggcactcgctcccgcaccctgggggacagctggctgcagggggagtgccagcggtggtgagtgcagggcagggaggggggctggaaccgccctgctggagagcagagtcctgagtcccggctctttcccagctcctgcaccccggagggtgtgatctgcgaagatacggagtgtgcaggtctgggctgcctccggatccccgcctcagccacccttctagcctcatgccttgcctgccatgtgctctgtgtctcattttctcccaccttacttaactgccactcccttggccaccatgcaggtccccacccagtcctttggcctttgctccctccgcctcctctgacctcacctgtgccctcccacagtgcctgaggcttggacgctgtggtcctcctggtccgactgccctgtctcctgtggaggtggaaaccaggtccgaacccgggcctgcagggccgcagcccctcaccacaggagcccaccctgcctgggccctgacacccagaccaggcagcagccttgcccagggctgctggaggcctgctcctggggcccgtgggggccctgttcccgcagctgcggcccgggcctggcctctcgctctgggtcctgcccctgcctgatggccaaggccgaccccacctgcaacagcaccttcctccacctggacacccagggctgctactcagggccctgcccaggtgagtgttcaggggaagtgaaatcacctctctacttttcctaccttgggagattcagaaaataaatgttcctagttcccggatcatcccttaaaataagcctgccctgtctgtgcccccatgttttgctcagttcctttcctcttcccaccatctcttccctcggggccctccttgtagggtgagagggcgtccagccagctgggcctttcaggcccctcttgcctgtttcctgtgcagggtctcggcagggctggggtgagagggagggcaggcaggggagaggtgggctgacacacccctccggtccctagaggagtgtgtgtggagcagctggagcagctggacgcgctgctcttgccgggtgctggtgcagcagcgctaccgacaccagggcccggcgtcccgaggggccagggcaggcgccccctgcacgcggctggatggccacttccggccttgccttatcagcaactgctctggtgaggctccagcagcaagttaaccagggagctgcgcagggcagcagccaccaagggtccctgctggaactccctgctcccctcccctcacagccaatgtagtgccccaagacctcagagcagctgcctgcgcccgtgcctgccctcaaacccagctgctcccctgctccccccagatactccctcatcacagctgcgaccccaatccctcaccacaatttgtccaccctgcagctgccggcccgcctgtggctttggcccatgtagctgccctctaggagggtgtcttacccagctcctgctgcggctgccctccatctctgcccctctgtctcccatctctgcccctctgtctcccatctgccaatttctggagcacctgccaaggcccctcactcctgcagccccctcctcagctgcctcctccaggcatcttcctggctctccaaggcccaacccatcctgatccttccctggaggtgcccacaggtgctgagtggatgccagatgggggatactggtctgttccaacttgcggagggtgggcatcttgtactctcaccaggtgaccccaagggcctcagtagagccacgcggcatgtgctctgggctttgggagtgatgtctctgggctgttcccccacaagcctgcctctcccccatctcccccagaggacagctgcacgcctccctttgagttccatgcctgcggctccccctgtgctgggctctgtgccacacacctgagccatcagctctgccaggacctgccaccctgccagccgggctgctactgccccaaggtgagagctgggagctggagcaacttccaaggagaagggggtcttctgcccacactcctgctcctccttctttctgtgatgtccatggcggccccacctccttcaaaccccttggaactcggtgcctcctcccagcttgccattcactcggcatcatgcatatgcacctgctgcaggcggggcacagtgctgggtgctgggatgacacgatgatcactgccccatctctccttccacccaggggctgctggagcaggctgggggctgcattcccccagaggagtgtaactgctggcatacctcagcagcaggagccgggatgaccctggcccctggggaccgcctgcagctgggctgtaaggagtggtgagtgatggtggaagggagacagagggctggggccagggaatagggcagggaggcctggggggcccagtccagcctcaggacagaggaccctgagatgctagagtttgcagctccctcatcttgccccaaatgtgcctaggggtcaggttacccttgcatgaccacccccaccccccggaggtcctggactgggtcctgcctcccttagtctaccctgactaccccctcccacagtgaatgccggcgtggggagctgcactgcaccagccagggctgtcaaggtaaccctgacctatggagacaacagtccccattgcttgggactgggggagtttctgggatgcagaactttcagtgctaagacggggacagtcccaggcaaactgggatggtgggtcaccttaccctgcccccacaccaccctcagcctttctgtttccagcacttcctggtcatgaccctgagcccctcctgcctgtccaccagggtctctgggcccaggggtggtcactgggaagggcacccacaccctgtccttccaggtcttctgcctctgagtgagtggtccgagtggtcgccctgtgggccctgcctgccgcccagcgccctggcccctgcctccaggactgccctagaggagcactggctccgagacccaactggcctctcccccaccttggccccgctgctggcttcagagcagcaccgccaccggctctgtctggatcctgcgacagggaggccctggactggagcccctcacctctgcaccgcacccctcagccagcagcgcctctgccctgaccctggagcctgccctggtaatggggagaggcagaggccaggggacaggacgggcctggagtgcaggttggggggacctggccgggaggggctaggctatagagcacattgacctgctacccctcctgcttgtctctaaggcctgcaggatttgaagctgggggtggggtccaggcagcagctagaaagagaagcgggagagcctagagggctttaaggcctgccggagcgtttgcgacgacagagctcaaggcttgagggggaggcaagaggtgggcctgggtactgactccatcataccttccccagactcatgccagtggagtctgtgggggccatggagcccctgccaggtgccctgcagtggggggttcaggctacgctggagagaggcagaggccctctgtggaggaggctgccgggagccatgggctcaagacagaaagctgcaacggagggccctgcccaggtaactcccatccccgatccagaggagagcctgggacaggaacatctgagaccaaacctgaggggagagttggctctgccccagagccgtgcagtggaagcgggggcccaagagcgtccccaacacagactcctatcatctggtcgtcaggttagagctgcgaggcccaagacactgtattcaccctggactgtgccaaccagtgcccacacagctgtgccgacctctgggaccgcgttcagtgtctgcagggaccctgccgcccaggtagccagcaggccccaccacctagctgggagttccaggaaagcctgggcctcccccagctgcctcctgctcccagagagtgtgtgatctcgggcaggggtgggggaggttcagactgctgggtcatgagtgacagggcaggaaagtggtcactttcagcagccagctctgagtcctgcaaggagtgagggtcactcagggccactgttccatgtggatgctcaggtggctgtcagggttactcgggtggtgcccacacaggctagagcagcccgttcctgtgcatgggcagtgggagatactgtggaaactaggctttggactcgatctgattgctgggggaggatccattgtgtgagccctgcccgagcacccaatcttgttccgcctctttacccacacccctaggctgccgctgtccccctggccagctggtccaggatgggcgctgtgtgccgatctcctcttgccgctgtggcctccccagtgccaatgcctcttgggagctggccccggcccaggcggtgcagctggactgccaaaactggtatggctgcagccacgccagggctaagggagctttgggtggaggcatggggcaggtcagccttcgtcagcattgttggggagtgagggttctgttcaccctgactggagccctttgtgcttacccctgtccacagcacctgtgtcaacgagtccctggtgtgcccacaccaggagtgtccagtccttgggccttggtcagcctggagcagttgctcggccccctgtggtgggggcactatggagcgacatcggacttgtgaggggggtcctggggtggcaccatgccaggcccaggacacagagcaacggcaggagtgtaacctgcagccctgccctggtaagtgccctgggcggcaggtgactgactccctccattgctgctgagcccaggccctgccccagctgtggggggtaggtgtggggagaggaggtcggacccagggcagctccctccctgggactggagatgctgggtccctcccatctccctacctgtgtgctccccacagagtgcccccctggccaggtgcttagtgcctgtgccacctcatgcccgtgcctctgctggcatctgcagcctggtgccatctgtgtgcaggagccctgccagcctggctgtggctgccctggagggcaggtgggtacggggtgctgtgtcctgactccctgtgggggaagccggcaggtggggagggaagaggcggtggtctgagtgtcactgagcctgccctgctgcagctgctgcacaatggcacgtgtgtgcctcccactgcctgcccctgcacccagcattctctgccctggggcctcaccctgaccctggaagagcaggcccaggagctgcccccagggactgtgctcacccggaactgcacccgctggtgagggcctggccctggggtggggagcagggatgaggaagggtagggaggaggacatgggaggcatctgagtgtgcttctgtcttctcagtgtctgccacggtggagccttcagctgctccctcgttgactgtcagggtgagatgtggctgtccatgccctgctgcacctccaaagtcaaggcccgggactggcactgaggaggagagacgggccctgctcacagactagacagagcttcagaaagccctcccctgtctgtccacactgacctctctctaactggagacccagcaccccctgccgagggctccctgggcactcagtgtggtctgccccacttgtgggggcattccctagcacacagtatacacagagccagggctgtgatgccaggaagtggaaggttctttccctgccagtgaggaaactgaggtctggaggggtgagcggaaatgaggggcctggcctggcagcccccgggctgatagcatttgccctgtggggtgcagtgttacccccatctgatcaagaccaagggcccacccaccgtgttcccagctctgccacgctgggctctgtgaatgcagacatgcagcatggccagcctccgggcagaccacccacccccagaacaggcagagacagggcacagtctctaggtctctgacaggcaggtagaaccccagagggtgagacatcagtgctgagaatagaggccgagtggacaggattggtcagggagccttttctggaggaggtgagacctggcctgggtccagctagtgtttgggtgggtggataagaaagatcaggaggtgtggttggaggctgctgtggctgagaaggcaagatggggacgtgtgggtgctcagcttgggaggggaggaatcgaggctggatccagggctgacctgaaagctgggttggatggtcttccctggcagagtgccccctggggaaacgtggcagcaggtggccccgggggagctggggctctgcgagcagacgtgcctggagatgaacgccacaaagacccagagtaactgcagttcagctcgagcctcgggctgcgtgtgccagcccgggcacttccgcagccaggcaggcccctgcgtccccgaagaccactgcgagtgctggcaccttgggcgtccccacctggtgagacaccgaaccccctctgctaccactcacccattcctgaccccaagcctccccatctgtctgtaactccactggctcctccccctactccaggccctgcagcagccggcagggctccgctctccccctgggacagtctctggccccaacagttcatctccttcctgggtctcttgttgcctgactccatccaagcccattgccccggctaggcactcacaggctgggcttggggatcagggatactattatagaaaagtctgcaagttggagccgggcacggtggctcatgcctgtaatcccagcactttgggaggctgaggtaggcggatcatgaggtcgagagatcaagaccatcctggccaacatggtgaaaccccatctctactaaaaatacaaacattagctgagagtgctggtgcgtgcctgtagtcccagctactcgggaggctgaggcgggagaatcacttgaactggggaggtggaggttgcagtgagccgagattgtgccactgcactccagcctggcgacagagtgagactccgtctcaaaaaacaaaacaaaacaatacaaaacaaaacaaaacaaaacaaaacaaatctgcaagttgggagagaccaagaggaggctctcccctactctccccagcctggatctgaatggcaggaggcctgtgagagctgcctctgcctcagtgggaggcctgtctgcacccagcactgctccccactcacctgtgctcaggtacgccctgcatccctgctactctccggggtggttccccccttacctgggctccggtaccccctgcagccctaccaccctccctggttcctcgggctccttcctgggaccctcctccgaggttggtcttagggtctctgagtggggagggcgggccgggctccaggtgtcaagaccaccttgggactctctccctctgcagggcgaggagatggtgctggagccagggagctgctgtccctcttgccgcagggaggctccgggtatggagggaacctgggtgcattgtggggtgcctctccctggtctagacccttctcccctgccaccccacacctggcctttgcagcctggcagctgcctgactcccccaggccaacccaccatggggatttgaggagtgaagaccccagcacatatcatagcgcctggtcacctcgccccacacgcttccctcagacccaggccctgcccctcttcccacagtcccctcagtcccctcctcctcctgtgctctgtccccccccccacagtctcctcagtcatcccctcctcctgtgtcccctccacagtcccctcagtcatcccctcctcctcctgtgctctgtcccccccacagtcccctctgccatctcctcctcctgtgtcctctacagtccccttagtcccctcctcctcctgtgtccccctccacagtccctcagtcacctcctcctgtgccttcccgcacagtcccctcagtcacctcctcctctgtcccccccacagtcccctcagtcccctcctcctcctgtgctgtcccccacagtcccctccatcatcccctccacctgtgtcccctccacagtcccctcagtcccctccacctcctgtgtcctcccacagtcccctcagtcccctcctcctgtgtcctcccacagtctcctcagtcatcccctcctcctgtgtcccctcagtcatcccctcctcctgtgtcccctccacagtccccgcagtcatcccctcctcctgtgtcctcctccacagtctcctcagtcccctcctcctgtgtcccccccacagtcccctcagtcacctcctcctcctgtgccctcccccacagtcccctccatcatcccctcctcctgtgtcccccccacagtcccctcagtcacctcctcctctgtccccccgcacagtcccctcagtcacctcctcctcctgtgccttcccgcacagtcccctcagtcacctcctcctctgtccccccacagtcccctcagtcccctcctcctcctgtgctgtcccccacagtcccctccatcatcccctccacctgtgtcccctccacagtcccctcagtcccctccacctcctatgtcctcccacagtcccctcagtcccctcctcctgtgtcctcccacagtctcctcagtcatcccctcctcctgtgtcccctccacagtcccctcagtcatcccctcctcctgtgtcccctccacagtcccctcagtcccctcctcctcctgtgtcctcccacagtcccctcagtcccctcctcctgtgtcctcccacagtctcctcagtcatcccctcctcctgtgtcccctccacagtccccttagtcacctcctcctcctgtgccttcccgcacagtcccctcagtcacctcctcctctgtccccccccacagtcccctcagtcacctcctcctcctgtgccctccacaacagtcccctcagtcatcccctcctcctgtgtcctcctccacagtcctctcagtcatctcctcctcctgtgtcctcccacaacagtcccctcagtcatcccctcctcctgtgtcccctccacagtcccctcctcctctgtcccccccacagtccccagtcccctcctcctcctgtgcctcccctccacagtcccctcagtcacctcctcctcctgtgtcctcccacaacagtcccctcagtcatcccctcctcctgtgtcctcccacagtcccctcagtcacctcctcctcctgtgccgtcccccacagtcccctcagtcacctccttctcctgtgcctcccctccacagtcccctcagtcacctcctcctgtgtccttccacagtctcctctgtcacctcctcctcctgtgcctcccctccacagtcccctcagtcatcccctcctcctgtgtcctcccacagtcccctcagtcacctcctcctcctatgcctcccctccacagtcccctctgtcacctccttctcctgtgccctccccacagtctcctctgtcacctcctcctcctgtttccccctgcattccccctgtcacctcgttctcctgtgcctccccacccccacagtcccctcagtcacctctgcctcctgtgccccacccccacctcctgccactcaatgcccctccccacagaggagcagtcgccctcctgccagctcctcacggagcttcgaaacttcaccaaagggacctgttacctggaccaggtagaagtgagctactgcagtgggtactgcccatccagcacccatgtcatgccagaggtgagccagggacctgctgtccaggccaggggaatcacgttggccagtggccaccgagggctgccctgagcctgggacctgggcagaaccagagtccatgaggcacaaggtgcttctgatggagataacagtggagttggggaggcagatggtcagagctttccccaaggcagtggtgtgcacctgcaggttggcccagaggtttcactgggtgcctgaccccctcccacagaggtcttctgtggccccacaccattcccagagtgtgcccgctgtgcccttcaaggcaatgagccaggagcccagcaaagaaaggcatggaggagctaagctagcctctgacatcagaacccatcacacggtgcatgagagcatgagagctctgccggaatgcactttctacagagaggatcaccgcacacatttcctgcaagctgtccgagccaggctggctctgagtcttgggcaggtggctccgctctgcgtttgccctctgtggacccagaagcccctgatccttcttaggatcttccaaggggctctgtgcccaccctgactcccctcagcctgatgagctgtaacctgagctgcctcctgccagggtcctctctccagcttcactcacactactcctgcctgcccctaggcccacctcccagcactctgcggccatcccttctgcttcagcctacctggtttacctcatcctggaagacaaggatactttcctacctggtccccaaagacacagcccctcaaccctcggccgctctacggctcccccaggcgcgccctggacctcctggaaatactttcccaaatcactttcggaattttttttcacacttttagaatttttaaaacatagagtgagaaaagagagaaagtaattaagagatgcttttttttttttcctgaggaaagaaattgatagtgggatacaaattggagggaaattttttcgctgaaaaacctcttgcagtttttgaacctggcattgtatgaatgtactacccatttaaaagtaaaattataaatagaattatacataaaattaaatgatatgcttataggactctgatataggtgctttaaccacagtgcacagggatctgctttggagtgaaaactcactttgcacttgggatcagaactatgcagttagaactgacttatttgtagtttcatagattataactctgtctgtccaactagactctaagccccttgcggtagaagtatgtccttccccctgcagccaggaggcactgatgggaacgttaaaagtattcgtttaacctgtaggttgttggacattcagacagtgggggtgaaggaggtgggcttcttgcaaaaggggcttggcagtggcccagccaccctgctcagtgaagagggtgggatctggccctcccaccatcccaccctgcctaagatgggaaaggccaagggaggggaggaaactccatttggccctagttcacccgctccctctcgcccaggagccatacctgcagagccagtgtgactgctgcagctaccgtctagacccggagagccctgtgcggatcctgaacctgcgctgtctgggtggccacacagagcccgtggtgctgccggtcatccacagctgccagtgcagctcctgccagggtgggtctgggcagggaggggacggggcaggagcctgggcaaggacccagtgttgtgaaccagacccaggaacacacgtgtagctcctcactccatccttcttccttgagtccttccagtccacgtttttccttcttctcggtgttcttgttaatttcatctcctatcatgcatacttgtgggtgtctggggtagttgcacctagttcaaaccccagctcatctgtttcctttgtttccttgctcagcctccctgacatcatctttttttttttttttttttgtgatggggtctcactctgtcacccaggctggagtgcagtggtgtgatctcggctcactgcagcctggaactcctggtctcaggtgatccttccgcctcagcctcctgagtagccgggaccacaggtcacaggtgtgagccaccatgccgggctaatttttcttttccttttttttttttttttttttttctgtagggacggggtttcgccatgttgcccaggctgttcttgaactcctgggctcgagtgatccacctgcctcagcctcccaatgcgctggggttacaggcaggaaccactgcacccagccccctgacctcatcttttaagcaaggctgacattgctatgcaggcttgttgggtggacttggtgagggcacgcgtgtgaagtggctggcaggtgcctagttctgttaagcacctgccatatgataacctgaggtcccactgtgtggcagatgaaggggaaacagaggtggaaggcacccgtgccacctgggtggagcacagtggaaggcctggtgttggctctgggcgtcctcctggcaccagcctgaccactctgcctctcttactaacccatctctccctcacgtgtcccctgggaggtgacttctcaaagcgctaacaggctccgctgggtgagtccacagctgtccctcttgtgatcatgggactcagcagcactgaccacgtccttccacgctctctcacctgcccccaactgggggcccatgacttggcattagcatgttccaaataaagtgatactggcaacaaatccctgtgcagcgtctccatcctggggctcgagggaagagggagggagggcctgagtcctggcctggacccatgtgaggactttgtctcctggagacctctgcgcatctactatggactcaagatggcattccccatgactggtgaacctggacaaatcattcccatatctgagcctcagttccatctgtagctggacagggttgaatggagcctgaagacctcctgttattagacaccgctgtgtcccaggtcatattcctccacccaatatgatttcagctgcagctgtggaggacagtccgctacatgtgggctgatgtctgcttctccctctcctttttataacctcgttttttacaacactactctgcccacctcccaattgctttccttgttttattcaccccaaagtcctatcctaccctgtgaagccagagatagctagctagaagcacactattgagctaagtactggggacaaaaattaaaagaggcccactgtgctgcaaaagactagctcatcctgttccatgtctccatggtctccattcctcctcaggagaccaagcctccccgtttgtccctcaacatcaccacctctcatgccatcctcttgtaaatcccacagtctcacctgatcccccacaccgcctctccctcccagatacccactggggcctctgagactccacatctgtcttccgtagactctgctccatcgtccccatctccaaaggcttcttccaccttcatgtcatgactgacactagctcgcccatgccttgaaggcttcacttcacctggaagctgagacgtcatcccacctccaggccaggaaaagagatacttgtcttctgtgacgttcatgtttattgtttctgttgggccagttctccctgttcctcctgcaaagagccgtcttcccgggttgtctgagccactctgtagtgacaccaccctccctgactcccacctgccaccctggtcactccctatcatccacagaagaatttaactcatggcccagcattgctttccacccattttcagtgtccatgtggatactccactcaaaattctggcctcacattctttgcctgctcacttacaatgaccttcttcactctgtcttgggaatccactcccacgactagaccattttcaaaacctcgcaaatatttacttaccaatcatgacttcccatccctccagctgacttgctctaatactccactgctataatttatggctgcttttgtgatttcaatttcattgacccaccactttctcacttttttattagtttcctatcttccctcgtgacacagcttagattcatggtctatatagtgattctcaacaccaactgcacgtgagaagcacatgacatgaggagctcttaaaaaatatcaatgccagctgggcatggtggctcatgcctataatcccagcactttgggaggcgggttgatcacttgagcctggaagtttgagatcagcctgggcaacatagtgagaacccatctctacaaaaagtaaaaaaacagctagccaggcgtgatggcacactcctgtagtcctagctactcggaagggtgaggtgggaggataccttaagcccaggaggtcaagactgcagtcagccaagatcacgcaactgccctccagtctgggtgacagagtgagaccctgtctcttaaaaaacaaaaacaaacaaaaaaattaaacaaattaaaaaaatcagtgcccatgccccatcctaggcctattaaatcaggatgtttgaaaggtccatgggtgattccaatgtgcagctggaattgagaatcactttcctaccatcataattactcctgcaagtactgttcattcccttgcttttctgtgcctccttcatacctacctggcaatactccaagccaggatgaagccaaatatctacccaactttctgcttctaaacagaatttcgcagccaggctttttttaaactgaaatttgtgatcataaacttcaaattggcctttaattcaaggtttgaggtaagctctatttcccattctccaagatgacttggtataccttctattccccacttcattttcatgagatgatcttgtctcaaagagacatcatcggatggaaattccctcagtaaatctacaaacaaatgtacatctactccatcttcttcttccctcctggcataaccaaaagtgttgctatcccggccagacgcggtggttcaggcttgtaatcccagcactttgggaggccaatgcaggtgaatcacttgaggtcaggagttcgagaccagcctggccaacatggtgaaatcctgtctctactaaaaatacaaaaattagcagggtgtgatggtgcacgcctgtagtcccagctactcaggaggctgacacaggggaattgtttgaacctgggaggtggaggttgcagtgagccaagattgagccactgcactccagcctgggtgacagagagagactccatctcaaaaaaaaaaaaaaaaaaaaaagtgttcctatccctaggaagggccctcgataccctgttcctagaccctcctgatttctcaaggacttggttccttgcactatccccctttgaatcatcagtttccttcccatcaacacagaaacaagatcttgtgactcatatcttagtcctactgctttgattccccatttccccctagatactgctccatttttcttggaaagatggaaaaccttttatggaaaaatgtgtcaaaagaatgatttaccctagctgtcctccagttttttaacccctaaaagagaatctgttataaagacatggataactcatgggcagaaatatagctcttcaaggtagtgatatagtcgaggtggtgagtggcaggccacttggaatccacagagtcctcactctctgccttctcctccacatttcttgtgtctcattctttttttcagtaatgcagactcccctacactcctcgaacggaatttaggtctattcaaccttggccagaagagcagagctggataatggaaaacgcttacttgaagcctgtgtaacatggtgaaaccctgtctctactaaaaatacaaaaaaattagttgaccattgtcttaatctctatgtgcttctgtaacaaaatccctggaactaggtaatttataaattatggatacttatttcttatgattctggaggctgggaaatccaagatcaaagcaccagcagtgtctgtgtctggtgagagcctggtctctgcttccaggagggcacctttttgctctgtcctcacatggcagaaggcagaggggcagaagggcaaagggcctagctagttcccccagcacgcatgtggtcactaacaccttcatgaaggcacatccctgccctggccccctaaaagtcttttttttttttgagacatggtcttgctctgtcacccaggctggagtgcagaagcgccatcccggcttactgcagcctcgaccacccaggctcaagtgatccttccacctcacaaaattattttatttttatagagatgggatctctcactgtgttgcacaggctggtctcaaactactgggctcaagtgatcctcctgtctcagcctcccaaagagttgggattagaggtgtgagccaccgcacttggacaaaacttcttataaggacactaatcccaccataagggcctgaccctcacgacttcatctaaacctcccaaacgccccatctcctgggaggggaacaccggtcagtccattgcacctcctttacctggcagaccctacctcttgctttaattctgctgaggcatcacttccgcaggaaatccttgactaagcacctcatatcccccaccgcttcactctaaggtgacaacgcgggctttaattcatgttttgtgcttacctctttcatagcccttgtctctgttttgtaattatctgtttctggtctgattccctaatagatcgtgagttccttgaaggcaaggcctttgtctcattcaactgtgttctcccaaaccctagaacacggcctgacccatggtaggcaaccaatgatactttttgagtgaatagaacaaaaagtattgccctccttaataaaagaaaacctagaacttcaaggctgacattggccttcgcgtagcccaatcagagcgctttgcccttgctgcagaggactaaaggacgccacgccgccgttgcctagtaactgtcgccggagggaggcggggagggtcgcaagcgcgccgccggcgtccaatcaggacctgcgttccgggagccaatagcagcttcgagagccgctcacctagagcggactacacttcccgtcacgccccgccgcctggggctgggcagtgaccgtaaagctgttcgctcggtgcgacgcaagtctcagctcagcgcgcttatcctgggtccaccggcgctaccgccccccgacgtgagagagcgaagttcttgggccgcgctccctccctacctgggtgccctccccctccgggagcctgggtccccggggcggtcgcggcggctgcatcctcaggccaggccgcggggggagggggcggcacgggcctccgaaagcggggccatggagcccagagagtcggggaaggtaggactggaaggcccgggggccgcccgctccctcccgaggatccccgagccgggctcgggcgaggcggggcggctcgggcggaggccccgcagatgagccaggcttgcagggaaggactcgccggcccgccctctcttcccgcacttcggcgcccgaccccgggagggtggcggagaggagcggacgcttccgttcggtgtccgcgcatcctccccgagctgccgagcgtccgctgggtcgatgctgggttgggtgacccccgagtggagcgatgcgaaggtgcttcctgttttccccaccaccttcggcgttttgaagaggccctgctaaggcttggagtctggatcggacgccagtgggagctgcagggtgggacgcttgagggcttgaccctgcctagatcctccttaccaagaaagggctgaaaagagagggcatctggcatgctttttgccacttctgtttctaggttatgtacttcatggaatatctgggcattgcttagaaacctgtgtcataaattggctttgggcaagaggctttgagttggaagaaaaggtggaaagaaagtgcttgggggcggagttcagggatttgacgggattgccagcgcttccaggccgtgtcatccaagaccagtgtggttgtgggcacattagcttggagacagtggcagcctcttgggactaacatctttctggatgttgtttgctgccagttcttgagtattgtttcttatttggcacagaggagaattctctcaacaaacgttttcgactgtttattgagtcccttaaaaaactgtccatttaataaacatttgtgatctgtgatttgcattgaacgagatgctggaagtatgaggataaataggaaatgatcacctttctcaaggagctctcctgcagttttcacttcaataacttggacacgcctgaaagggttgtcccacacgaaaagagagaaaaggataatgaggttcttttgatgctgtagtttttcctgggaagactaggaaggactctgaatttcaaaagaggtgatttctcgcatgagcatctcttccatcctccctccctccacaagctacagtgatgcatgtagcagacacggcacctacagagtacgtggtccaagccaataaagctcaacaaaacccaagcaaagatggagcttatggcccttaccctttggaaatatccccagattggtttagattgaacctgaatttgaataaagagaagcaaaatgtagggggaagaaggattataaaatattgggattgatattggtatcagtgatttgaagttgatttccaagctattctgttcagtcagaggctttcttagcctttaacgggagaagagaaatacggtcatgcgctgtataacaaggtttccatcaacaccgctctcacgtacaatcccctgagactacagtggggctgagaaattcctatcacctggtgacatcttcatgatcctgaccctgtgtaggcttaggctaatgtgtgtgtttgtgtcttaggttttaagaaagcttaaaaagtaaaaaaaaaaaaaaaaaaaaaaaaaaaaaaaatttaaaaatacaaaacctcatagaattagaatataaagaaaaatactttttgttgatggaatggtttgctggaaaataaaaatacaaaaatatttaaagaaaaatattgtacaggtgtacaatgtgtgttaagctaagtgttattacaaaagagtcaaaagtttaaaaaattaagtttataaagtaaaacagttacaataagctagggttaatttattattgaagaaagaaaaatttttgataaattcggcgtagccttagtgtgcagtgtttataaagtctacagaagtgttcagtcatgtcctaggccttcacattctctcaccactcactcactcactcactcactcacccagagcaacttccagtcctgcaagctccattcatggtaagtgcccaatacagatggaccttttttttttttttgtcttttctaccatattcttactgtaccttttctatgtttagatacgcaaatacttaccatgtgttacagtggcctacagttttcagtacagtaacatactgtgtaggattgtagcctagggggcaaaaggctatataccatatagcctagatatgtagtaggctgtaccatgtagttttgtataagtacactctgtgatgttccacaatgacagaactgcctaaggacacatttcctagaacttatccctgttgttaagcaacacatgactgtacaaacattttgggaggtagaggagaaacctgattccgtgtcctgtccaaccactaagtgaaacctcagagactggaaatttcacccttgattataatcttgattttagggtatctcagaaaggtgctcacccttcccaaagatagttgttttctaatatgggaaatgagaacttcatacaagaatgaaataaagtaattacaaaaccaactgtcagtgtaagatgtgttgcaaatgagtgacaaggaatagcggtgctgttctacaactccactccgaacagcattcttatggctcagaactgggagactacctcgtgagatagtggtttggtctattactagactcttccttgggtgctgttttgtggtctttattaactgacagccatcttgggccattggattgatatcccacattgaatgtaggacatcttgcctgtcattgacagaataatggataagggtcagacttttccccatcatgttctatcccatgatcctgttttattttcttcctaacccttatcactaaataaaattctcatgttcatttatttatttacgtatttgttgacttgactcttacatccccagctagaacagtggagcagttcctggcatttaatagggtctcaggaaggaatgctcataaaatagcatcactacaggagcccttttgctgcaaggtgtgggtgctctgaagaacactgcagcccgccacctcatgtgcctcctaggagactgtgctgttggtgccccgaaagagaagtctatatgtgtacttgttgctgtatgtatttgttgcctcaacgtttctgtttcttggccctctctatctttcctgtacaagtgactgatactcctttctcatttttttctgaacatggttctattattgcacttatatcttagttgtctgccacctcctgatagattttaatctcatatctttgaattaccatgcatcaagcacatagaaacacttaagtaataaatgtgtgttgaatgaaaaaatgaattaaatgcctataaaatactttccatatagcatggttgtggggggaagggtggtgttgatgaaggaagttataaaatcaagcagcatagatttccttaacactggactccaggggggatataaagccttccttgctcaggagaaggataaatgcttgggccaggtggttaggaaatccttcctgaaagagaacgtgaatcgcgactttatgggtgggtagattctaagttggtgggaggaagtgtgcagtcaggatctaaagactgggaatgtagagagaggaaaggtgcgagataggctgggtgattaaaatgatatgaatctggctggaggagacattccaagcgaggcaatgcacagagctaaagttagaaagtgggttagattcagactgaggggactttggtgctagactgagaagtcagacagctttaccttgtagagagtgactgggaaccgctaaaatagaacatcgagagagattctttgcattacacataggtgaggagctcctcttattcacgcagatttgtgttttctttacattgcagtcacctggaatcagaaggctcttgctataatattgcttaagagagataccaggtgttagtgttatcactcttgttaggaagacactattatccaaatggacagtcctagccatgttcctcctcaggtggagctaacgtgatgggctccttggcccttatgctcacctgtgcatgcccgggaaggatgggcatgaagagggatcctggctgtcctgaatcacaagtgttttaacctgccccaatctggacaggctgccctcccgtcctgggatacagcagtcatcctgaatctgccttcagcctaatcttggggttgtcttcaatgcttccccacgttggctgtccctaggttgtatctcatggtgactcctgtttgaccactttctttgagtggagcttgtcttccaatcggtttttggaaatatttcattttgctttggaagccactcgagcaaacagttatttaaatgtacacatttggcagtacaattccatttttgtttttaaaactgttcatacatattcatagactaaagactgggaggttatataccaaatgttaacagattctcaggaaagaagggtaatgaaaagtaattatttttcaataaagggaatgtaggtgatcttaatacatttttttctgcttatttctattgtccaaattttctgcagtcaacatgagaaaaatctattataatagtgaccggtaagaatgattgatatcattttcctcaagaaatgtctactgttgaggttaaaatcgatattccacctattttaaatggcatgctgttatttcccaatgttatttttctttggagtgagaagtttgttttttgttgataatttgatttatttctttttaaaatttctttaactaggtaatgttttcatggcacaaaacttaaaatgataaacatttctacttctttttctgttgatttcttttataacactttgttgcgtggctgtggtaccttaaacctctttgatggtgtagcttgatgatagttttttttaagtttttttctccatgccttccctccattttcttagcaacctgccccccaaaccccaacacctcccatctattttggtctctatagtccctgttagatcctttccccgagtgtctggtagtccagtctgctgacatttagtggtggaagaccgaaaatgtaatagctctgtgcttgtgcgagggaggacgggcttatcagctggagcctcatgtaaaggaacctggggaggcatttgttggggcacagccctcccctagttcttgttccattgggctgcctgcccgccctcccatgctggaggtttccggtgctggaagatgccaagcctttgaggatgcagagtgtaccttgggtggttctccgctttgcccgctgccgggtgagggtttgattttcttggatctgctgaagtgactgcttttgcatctgcttcttggttttcaagagtgtattgctgtcatctccttgttgcgccccctattatagtgggggttttgttttggggagggggtcttttaaattcacggggaataaacaaaattaaatgggcttgtttaatctgccatcttaatctggaactcctccaaacactttctgaactccctacccctcagagcccctttacaagccacacgggatgtagatctcagccccaaagcattgcctgttttcatcatcgacttcattcacagacatagttctaaatgactttcagctatttctagaaattagacacatcttcctaagcgaaggtttaccatgtttaaggttccatgaaagaatgtgccctaagttgttgcccagcccctggctgagaagaaacgggcgtgtgggaggcgggtgaagagcacacagggaggggacggagaagctcctgagccagcctccttcatggctcagtttcatttcagtgcgtggcacttcccagaagaaacgagtctcgttgtcactgtgatctgtacccaggtggggagagatggggtgtgggccatgcatgtaaattgacaacacccctccccgtgtagggtgccctcaggtggtcaggaacacttttggaagataaatctaaggaagagagtggtacttagcagctgtcattttcctttcaggctcctgtgacgtttgatgacatcactgtgtacttactccaggaggaatgggtgctgctgagccagcaacagaaggagctctgtggttccaacaagctggtggcaccactgggtatgggtgcccatccacatccctgccactgtcaatttagatcggcattcccaacctcatctgcgtcaggaacactggagagagttttctggaatccaagcatttgtctaggcatctttactccacctgtctgctcgatcccgtatctaccttaattgcatgcaaattcacacatcaccctttctcttctccccttaaaatggtcaagagaagtggggcaatctggcaggcctgggctagactcctgggtctgtctcctggtgcctcagaatgccccaaggggccgggagggaaactcggaaactaggcctgtggatctgtggagcccgtaggacactggaggtaggaagcagtggtggcaagagcatcacatttgtgatgtggaaatctggtctcaatcccagctctccactggatacttgaatgcccttggcctttttaagcctgaatttccatcgtcttagagatgagtgagataaaacagtttaagagtttgcacaagtgtaggtattttcatctcatctatttttgaatgctctttcctttgattctttgggtagactttctgtgcgaaggacagaggtggttggttgtatttcaacatgtgtgtacacatatgcactgtttgctgattgcaagttgatgactgtctaccatgcctgtcttttcttatttcatcttggcccctgtgtaaggcacggtagaagcaacaatcagcattttatgggtggaaggattgcagctggggtgagtcttcctgtgccggctaaaagagtttgaaaaccactgattcttccaaacaagaagttgcaaaatagcagctcatgggccagatatggctcactgcttggagttttgttttgctttgttttttggctttcatttcttttgtttggcttcttaaaaatattaagtaaattgccaatatttagttattaggagttttcacataagaatatggatttctggcatctcttgacaaacgggatggtgtggcagggctgagcctgcatcctgagtggcagcccttctgcagctgagtagctgctgttcccttacgtcttgcaggttgccacagcccctgcacttggcctggtttcttctgttatattaccaggctggcccctctcagtatttgggtttctgacccatagtttgtatacctgtttagcctccttgtgccctcattcctttctcctagtctcctattctattaggggcctcacagataagagtttctaaaccactgaaccactgtgctgaaccaccaagactcctactttcctccttggccccttatctcaccatgccgagagatgtcgcagacagatacctccttcgtgttgtgacccggagccaggtcttcatagtgcttttctctctctctcgctctcttttttttttttggactcaggaccaactgttgccaatcctgagctgttccgcaagttcggacgagggccagagccatggcttggcagcgtccagggccagaggagccttctggagcatcacccaggtgagtgtggaactgcactcaggggcagatgcttggctggagagggagcatgggcagccccaggactccaggctcatcctctgcccttcctgttctccaccaactgacactgctgttctcctcccaggtgccatctgattaatacctaaatatacacactgcccctaatgtccttctccaacctctcatctcccattgtcttatttctacccaggagaatatgtttatttataattattataagttccatgaaggcatgactttgtcttatttacaaccatatttctagtgcttagaacaatacctggcacccagctgttgcacagtagataatcactgaatgaatgaatgaatgaatgaacagctgtctgctaagttctagggatttatcttttctttcctcttttgataagaccctcctgttcaggggttggcttagccaggccagatgacatcttggcattacgtaaaataactgcgttaacccagcccctactgtgggagaagagggaggtggggaacaagatcctgtatgaatcaaatcacagaagtttgttttcccttgtgatttctctcagaccacaaagagctctagacagctttgtgactctggaaagtatcatagagacaaatttgtttcatttccccttgcttggctcttattttgagccttctgactcttactaacagcttcatgcccttacagtgttgtagaccagtctgttggcctggcacaaaaatgttgcgtcctcagccactgggcattggaacttatgttggtacataagaagtggttccacaggagttagagtcttttgagttgcatttcatctaagtgaataaagaaacttctagttcagcttgaagaagaaagatgtgaggtcatgagagtcctcatctgttcgaaggtttatgttataagagaggaattagacttgagtttctcttgagaactgggtcagcatccagtactttgaggtagaagtattcgaagatagattacagcttaaggaaaactacctggggaccaaaactgcctgcccaggagataggtagctttcttcccctggagttgcggtgtgtggctttagtgatcttttttaaatcctatattctattatgtcagtgttcttatccataaataaattttgactcctgaagattgtacgtttcatagatcagattgcaaagacttccttttggccggttgtatctgtcctttaaattcaaaaaacaaaaaggagggggagggttccgtaaagcccatccctttggctttattctggataggtgagggaagggcctgcagacttggccaggactagaagaaaattcaggtgtgtgtgtgtgtgtgtgtgtgtgtgtgtgtgtgtgtgtgctttccgtctttcatatttggtgtacctcagagcccctgtgagttgcagtggctctaactataggattttaaagccaatcccttctgtctcttctctaaaggaaaaaaacagatgggctacatgggagaaatggaggtgcaaggtcccaccagggagagtggacagtccctcccgcctcagaagaaagcctacctttcccacctcagtacaggcagtggacacatcgagggagactgggccggaagaaacaggaaacttctgaagccccggtccatccagaagtcgtggtttgtgcagtttccgtggctgatcatgaatgaggagcagacggctctgttctgctctgcttgccgagaatacccctccatcagggacaaacggtcaagactaatagaaggttatacaggaccattcaaggtggagactctcaaataccacgcgaagagcaaggcccacatgttctgtgtcaatgccttggcagcgagggaccccatctgggcagcccggttccggagcatcagagacccacctggagatgttctggccagcccggagccgctcttcactgcagattgccccatattctaccccccagggcctctgggaggatttgatagcatggctgagctcctgccaagttcaagagctgaactagaggaccctgggggggatggagcaattcctgcaatgtatctagactgcatttcagatttgaggcaaaaagaaatcactgatggcatccacagctcctcagacattaatattttatataatgatgcagtagaatcctgcattcaggtaatacgtttataatgattgctgtatcttacagagaaggattctatactgagaacgatgtatatccatgctgatgatggaaaaaagaatactagtgataacccactgctaacatcataatgttggcatataccaacatgcttatcatggactaggcattgttttagacgcgttccatgtattatctcatttaatttggacaacaaccctattatcatctcctttttgcaaataacgtaattagtgagatagaacatttctacttctggtataaaggaaacaatcatctttattcagaatccaaaataaacacagatctcaagaaatagcctacaaccacaaaatcacagagctcttaagtagtcaatatttaaatttgttttgtttaagagacagggtatggccctgtcacccaggctggactgtggtgtgatcatagctcactgcagcctttacctccaaggctcaagcaatccttcccactcagcctcccaagtagctgggaccacaggtgtgtgcccccacacctggataattttttatttttcgtagagatgggaatctcactatattgcccaggctggtcttgaactcctggactcaaccagtcctcctacctcatcctcccaaaatgctaggattacaggtatgatctaccactcctggctagtattttttaaattttaagtttggagtcatgttgcacttgtaaacattgcagttttttcacacatgttgtttgatgtaatgtttctgatgttgctgtgaggccggtagagcaggtgctattaaactcatcttgttggaagaacacagactttggaggaagtgacatgtccagggtcctagagctcttgtagtcagtgccagaatctgcccagagtcctgagctgccagcccatgctttccttccactccccgcagcactgctgggcactaaagtactctagcgcccaccttaggtttcctttgtagttaccgaatgctttggaaagttgtcctgtaaggaaactacgttcattggaagcttccccatttctcacctattgcatagaagtagaattttacaacaaatcatttttaactcccctccaggagtctggtgagaatagctcggaggttcctcctagagctgacatcataaggaatccagttcaacttcgtaaactctcatttttccaaaatccagaaaaacagcatagctcatttcttttcctgttcctgatattttttagtattagaagctaatgaaccgatgtaaccttttatcatctgaattcagcagtgaggcgtgtgtaaaccagtcactggtcataagcatctttagcttttttgaccacctctttgttcccatcccattgggaaatcttaggtgctcctagaggcacacagtcaccttttagttgtaggtgaccaggaggcagctctcaggactctgaggacagcatgcagtgagaggctctgcccagctgcctgttctttccacacgctttcatttccgcccaggagatcctaggatctgaccaagtctcacttggcttttacctactaattctggcctcctgaatttgattctttgactttcagtggataaattaattcctctgagtgcatctgggcctcttggtgagcttcccaggagaaatagggcttccaaaggccccagaagtgtcacgtgggagtctggctcggcaggcggtgctgagtggccgctgctctttgttccaggacccttctgcagaggggctgtcggaggaggttcctgtggtgtttgaggagctgccggtggtgttcgaggatgtggcagtgtatttcacccgggaggagtggggcatgctagacaagcggcagaaggagctgtacagagacgtgatgcggatgaactacgagctgttggcatccttgggtaaagacgcaccgagcctcttattcaccaccctcctttgacttgggaagcccacaaggggagctgtggcttgtggttatcttcccattcctgccccctccctgtgtgtaggcagagaccgatcctgtcttttgcacctcataactcccctgcttggggtaactgtgctttatcaccttctcatccacccacctgttcatccattcgtcccccaccaaacattttggagtacctactatgtgccagatgaacacagctgatccatggtctctgctttcaagggcctagcacgtttgtgggagagacagacattttaataagaaactataaaataatacagtctcccataaaagagcttccagaagagtacccggggctactgaagaagagggatttgatttcctgggcattggtgggaggaatcaggaagcctttatagagtaggaaatgttttaattgagttcaaaaccaggtggatcagaaggaggaagggcattgagccatgatggaggggacggcctggcagagccacccctatctgtgcagcccagggctaaggctcctgcatcctggccaggcgccggcaagggttggcagccttcagcacgggagtcatggggtttggaccttggcagattaggaagagggcagtgcttcttgctcctcaggatggtgctctcctctcctgcatctgctgttttatcttctctttgcctctttctggcagattagcaaggttcttatgaagcatcaagatggaaagacaactttttttgttggagacagtctcactctgtcgcccaagctggagtgcagtggcgtgatcttggttcactgcaacctctgcctcccaggctaatttttgttttttgagtagagacggggtttcaccatgttggccaggctggtgtcgaactcctgacctcaggtgatccacctgccttggcctctcaaagtgctaggattacaggtatgagccagcacacctggccaacatgtttttgtcattgttcgtaatttttaaatggcttcccaaacattcagaagtgactaaaattatttattttgtggtgacagaggttttgttgtcatgccctaggttaggtgtatcccctcagagtatcactgcccgtgctgtgctgaagagcagtgagagtgagggcgaaattcacacctgtcttaaaaatgcataccctctgcaaaaagttgggttttcctttaatgtaatcggcactagcgactcagtttcactgtgaggcccccgggcgattgtgaaggtaccaggcgatggtgttgctggcccagggcagcttctgcagcagtgcagggagggctggccaggattgtttagcctgtgcctgtttcctcacgttttgtgtgttgacagagcatgatctaaacattttatcagtttctttttcatttacgtaaattaggcagtagggaaatctcagctaactaaggtctttaaattttatttggatgaacaaaaaatgtaatcagagggaagggaactcattttcctcgagggtcagaggcaggaatcagaaaggctttctagggggtgggcctggcctctccggttgtctgtgaaattgagacaggtatgggagtctagaaacggagttgcatgtgtgtgattcctttcagttactttaattggatctctggttatccttgaactatccccgaatttaaacagttcttcatgtttgagatatagaagcatcttaaggagcctggggactatgggcagggcctggcataagctatttgtatgtttaaaagtggtatataatagtattaaattgggatataaagtagtgttaaaacatagtggagattctttaattgttattattatttttactttggcttgtttttttttttatttcccacactttaccctccataacaaatgctctaagagttgaaaaccaaatattattttgcattatcttttaatacacaaaacaacttcttggggtgaactcagttttgtgtgtgtgtgtgtgtgtgtgtgtgtgtgtgtgtgagagagagagagagagacaggctgtcactctgtcacccaggctggagtgcagtggtgccatcatagctcactgtaaccttgaactcctgggctcaagcaatcctcctgccttagcctcccaagtagctgggactacaggcgcatgccacaacacctggctaatgtttaaatttttttgtagagatggagtctcactttgctgcccaggctggtctcaaactgctggactcaagtgatcctgctgacttagcccccaaagtgttggattacggcgtgagccactgcacctggcttgccatatctgatgaagtctgttgcttcttcccaaaaagcagccagaaatctcaattacatcccactgttaagaaactaatatttgtcattaatggaaatagacaggccaacatagggactatgtgggtagcccttgcttttatttgtaaaggtgtcatcgtatgctgagtggccactcactgcaggcgggcagtttcttgtccacaggagaagtcggtaactacagccaggccttacagagctgggggaaggcgttgtgtcactcatggaaaacaacactgagtgggagggccctaaagaagatgagcaggggagttcgagtcccccagcttctccacggcaggacatgtgatgatggcctccaagtgggggcagccggagctagagaaagaagaaccaaggtgaggggctagagtggcatctatttatttgtttgtttgagatggggtctctctatattgcccagtcaggactgaaactcccgggcccaggcgatcctcctgcctccatctccggagtatctgggattacaggcacacgcactgcacctggctagagtggcttttgcagaatggattcatgggatagggcctgctggcccttggtgaagttagcctggaaggatgaggagtcctttgtaggccaaaccattgttatggactgttatggaatgtgggtgtttgtgggtgtgtgcacgcactcgccacagttatgtgccctccttctttttccattactaagtcatagaaaacgctgaaaattcccctccatttcatttgtttggaagggaacaaaaagaagaggttttgataagatgtaggctgcagcttcagagaggtaccatcagggtacggtattcctggggccagggtagtggcgccagcggcagtcaaaggtggacagtacccaaaaggaatataaatggaggcaaacagatttgggaacatttggtccctgtttgttttcaattattctttaaaaatatttctgccgggtgcggtggctcacgcctgtaatcccagcactttgggagactgaggcaggtggatcacctgaggtcgggagttcgagaccagcctggccaacatggcgagaccccatctctactaaaaatacaaaaattagccgagcgtagtggcacacacccttagttccagctactcgggaggctgaggcaggagaatcgcttgaacctgggaggtggaggttgcagtgagccaagatcgtgccactgtactccagcctgggcgacagagccagactccatctcaaaaaaaaaaaaaaaagaaaaatgacagtcccctgtcccacctttctcttttacaaagtcctgttccccagaatcttgtagctgtttcttccagtaatttgccgcattatttctaaataacgtatgtggacattatcttaggagggacggactccagcaggacgcgcttataaaacaattgcatcctcccgttcaccgctgagcgtgtcagctctgggggccttttctttctcaccctctgggttaaatctaggcagggcctggaactttttcttatcacactcaaataacatgaaatcttcctgttctaatttcagtgagtgcaatgcctggtacaaaactcttcaaaagtgtcccgatcaaaaaaaagacagagaaaggctggcaaactacctcaattaaaggagactgaagaggtgtgacaacttgagtgcatgatgctaggacagatgctgggctatagagacattttggggacaagtgaagaaatttagtatgaacttagattagataatagtatgatatcagggttgagtttcctggttttgatcattataactctggttatattataactttgctttctgctgccccatttcaaaggactgcagactcatgtattatctcacaactctgcaggtggggagtccaggtgggcctgatcaggttctctgcttagagtcttagcccaaaccaaggggccggccaggcaggctcctgtctggaggctctgagctcacttatgctgttgccagaatctagctccttgcggttctcctgctgcctgccagcggggagcactttcagcccaggagctgctctcaggtgcttccctgtggccccctccgtgctcaggccggcagcagtgtttggaatcgtcacgtgccctgaagctctgacttcctgggctgctgccagctgagaacagcaccagcttttaaagagctgtgtaattaggtcggctccactggctaatctccctttgctgtgcaaggtaacgtgatgacagtgtgacctctcatcctgttcagagtcccctaacctcaaggggtaaaggttaggccagggtgagggccctggagcccatgttcgaatcccacctactacctatgaaagggtccttttttgttgggtaatacacatgaagtatttaggaataaagggacatgcaaacaatttactctcaaatggttcagaaaaatattgtagctatacgtatagacccagcaggagagcgtgcctgtgagctcacaagcatgctggaacacatggggcagaatgtcaatgattggagttccttgtgttattcaatcttttctgtaaatttgaaattatatcagagatttaccaaaaggaaaatgtaggaaacaaaagccccgtctctgtgtagtagtagaaaatctggacttcatttaacactcaattcttgcctttccctcctcaacctgctgcggctgtagaatctggacccatgccataggaagaaaggggctcctcttctcccaccccctgctggtttcagaatttctgactcatcctcagtgggaatggcgttggtgggtgggagaggtataagaaaggtttcatttgacatgtaatctgacaccagctacttagagctgtagtcctttaaagctggttctcttctttgggtgtttgtgggttctgcagtacccccaacaggcactgagaccctctcgcttgcagttgcctggacatgggtgaatgtctgccctggcagcctgtctatataggcgccttcacaggggagtatcacactggtagccaaccgtcacgggcaggccccacagacaacgccaggcctcttctcattccccatgtggcccacatctgaaccatagaagcacttccagaccctgtgctctcccagacctgggattgtaggcctttctcgacatggccacctccaaggcaccccatggctaccttagtcttatccaaggctggactcgtggccattcacggctcccagagatacaggtcaggttaagggaaagggcgcacccaccactccccacagtcagagaggctcacaatatccttgacaatgctttccagaaacatccctggtgcccaacttcctggctccttcagtctcagctctgtgactcctctcgatgggcgcaggctggagccacagcccctggccctcagccattctctttccaggtcatgtgtccgtgtctggctttggaatgaggaagagctggctcctgctctgggggctttcagccggagcaggcagccggaatcacactttcatatcctgtggcttatgtttattgtattcctgatttattgattttagatattctctattgattcctactgtggaagatggagatacggccctgttacatcacctgggcccccgcttctcttccctccatcctctcagaacaggtacatcacactttgttggttacattggtataaattatttgcccagttatgattatgtgtgatttactgctgaacaaggtggtgtattgtgatggtgttgccttcattgtcggactcttccccctcgaattggaaaattttttcttctttttcatttttctcactttctttaccctcatcagttcttcccagactgtccagtggaattataaaactcctccgaagagtcttttccacgtgacgggacatcctgtgatctctccatttcattctttctctggagacttcgctccggggccttctcctcccctgctctgtctgacccaggcagctgttaggcctgcggcacacctgtggtctgagatgtgcctttgtctctcccccatttcccgagtctgtctcttcttttgtggttgacgtcttcatcttcttagtgtacatcctccagtggcttcctaaggaagggtgcaggggaggccttctttctgtgacgcatcctgtctaaaaacatcatattcttccctcatgattcagtgataacttgtttgggcatataggattctaggttggaaatacttttcctcagcattttgaaagcattgcccttttaggttttactggtgctattgagaggtctagtgccttcttattccagaatctttgaacatgacatatttgttctactctgaaagcttttgaaattgatttcaattttctcaaatttttaatgatatgccttgatgttttatataaagtgtgtttttaatctttttttttgggtatctggtgtttcccttccatgtggaaactggtctttccctgtttgggaaaattttcttgtatgatttcttcctattttctcttttctttcttccagaaattccttcctattagtttgatattggacttcctggattgagtctctggttttctgtttgtgtctttttctcctattttctgcttttatcttttttatactactttcttggacatttcctccattttattttctaacaatgctattttttttattctattgggttttttagttgctaaacactgttatttcctctttcatgaatggctatcatgagttttctttctaggaatattaattctcattattttgaagttttgttttgcttcctgctgtatttcaagtttttccaaatcttttcctacttgttttggtttctctctttcatgttagaggcttttcttaaataattatctctcggttcattcctgtgtacgagtaagccttagaaacggactggaagccctgtgcatggctgcagacctgtgcatggctgggaagcatcaagagtaggtttcacttttcactgtaggatgaccagttcttcttactgaagaacccacaaaagtcagtgtccatagatcttttgaggggagagggaagggcaattccatttttccaaagaaaacgcttcccgtctcctgtttggagggtatgataagcccagccaacattcttggagtcgagcagtgcaccccttggtccatagacatgactcgatctccctgctttcagtaccgcaccaccccttcacctttctgtgtacgtggtatatggggtctggagcctttctggataagtttttctgtaggccaaacctctgttctcctctggggtgtggtggtggtgtttcctggtttcccggaataggtgagaggacctgggattgatcagatctctgtcagatttgagccagtccactgctcccacccattccccatccaccacgttctcccatacctgttgcctgcagtttctgaatctttctgggattctctggtaccaaccagcttgcttctccttgttaacccctctgcaggcatttggtgttcagctctgtttgtttctctttcttttgtctccttcccttccaaaaatggacttgcattcctaatccaatttatcttgggcttatacctcattttgttatttttattcctttgccctcattttagagatattttaagaaggatatatgttcaatttaacacactttagtaatttacttatttatatttttattagtagtaaatatgtagatattgacacacacatatatgtatcattatatatataagtatattcaagcgatccaaagatgagtagtggaaaccaatctcccttttcctttgtccttcacttcctccccaggagcacccacaggcccagttgcttgtgtggctctccacagaaagtttatgcacacattcacatagacacacacaaaagcatgatgtagatagtgatggattttattttcaatagaggaaatggtttatctgcatacccctgaacaatattcctattttaagtaaaggttagtgcttaatccaaagacacaaatctcctttagtcagatttcaggctccattgcaggtggtaggtatttcagggggccctccaagtgcccctttcaaaaacccatgtagttggtcaccttcacaaaggccagctgtgggggcagaggggcacacgcatgggccagctgtgggggcagaggggcacacgcatgggccagctgtgggggcagaggggcacacgcgtgggccagctgtgggggcagaggggcacacgcgtgggccagctgtgggggcagaggggcacacgcgtgggccagctgtgggggcagaggggcacacgcgtgggccagctgtgggggcagaggggcacacgcgtgggccagctgtgggtggcaccttccacttctcatatggctgctgtttccccctgcctctctctcctgcttagtccctatgtttcttcctgtttccacccttccccctctggtgtgtatggctggcccatggatctgaggaagccctatcctagctgagggctgcccctccccttactgcctctttggcactctgggtttgcgctcagcctgcccctggccgactagactttataaggacagaacccagagacacctctgtgtacttcagggactgggtctagcttgagggggctactcgatttggccacagcagtgacatcagcatgattcttcatccttacaacaggacctgccgctgccaagccagacttgatctccaaactggagcggagggctgcaccctggatcaaggacccaaatgggccaaagtgggggaaaggtcgtcctccaggtgagtgtaaacctacagcattctgaaggacatgtgccagggcccaggcggctatgatgagtcaaacagcatgagctcagctgtgctcatctgatgggggccgattgggcaccaagcctggcaggaggccctgggtagacaagatgaataagcaactaaccctgcccacagagtgtagagtagtctgggaaacagggaaaaaacaggtccttttgtaagcagaagtactgatggaggctgtggcagagctggtgggagcaggtacgtggggacactggtctcgaggagccaggggacccagagatctgtgagcctctcatcccttctccctccttctccagtgctcggtgacagcactattggtttgtgagaattcgttgtcttgcctatctcaatcagtaatttcttggcttgtagttgctacacttacttctgtacctacttccttctgaggcttgtaaaagccttggcaggtgtttaacctattctattgtggagcctcacacgagagtgaaagccacctgcttatccaacagtctctgtggccaagggggttaattgaacttattggtatctggtgtcacatgatcccagggtagctgtgtggatagggtggttggggcgctggtgaaagaacccacaaggattagcaacaactctgggggagccagatgaactttcacagatgagaatgggtgagggtttaagtggacgccactttctctagaaagaaggattgcattcatcttctctgccttgcttaagggatacttattaaatttgggggtgtcttagctgatagaagatggcagagttctgggtagcagaaccaagcatgattcaattttctccaaagggaacaagaagatggtggcagtgagagaggcagacacacaggcctcggctgcagactccgcgttgcttccaggctctcccgtggaggcccgtgcctcctgctgcagttccagcatttgtgaggaaggagatggacctaggagaatcaagaggacatacaggccccgttccattcagaggtcatggtttgggcagttcccatggttagtaattgaccccaaagagaccaaactcttctgctcagcctgcatagaaagacctaatctccatgataaatcatctcggttagtcagaggttacacggggccttttaaagtggagactttaaaataccatgaagtcagcaaagcgcacaggctctgtgtcaacacggttgaaatcaaggaagacacccctcacactgccctcgttccagagatctccagcgacctcatggccaacatggagcactttttcaatgccgcctactccattgcataccactcaaggcccctgaatgactttgagaagatcctgcagctcctccaaagcacggggaccgtgatattaggcaagtaccgcaatcgcacggcgtgcactcagttcatcaagtacatctcagagaccctgaagagggagatcctggaggacgtgcggaactcgccctgtgtgagcgtgctgctggacagctccaccgacgcctccgagcaggcctgcgtggggatttacatccgctacttcaagcagatggaggtgaaagagtcctacatcactctggcccctctctacagtgagacagcagatgggtacttcgagaccatcgtttctgccctggatgagctggacatccccttccggaagcctggctgggtggtggggctggggacggatggctcagccatgttgagctgcagaggaggccttgtggaaaagttccaggaggtcatcccgcagctgctgcctgtccactgcgtggcccaccggctgcacctggctgtggtggacgcctgcgggagcatcgatctggtgaagaagtgtgaccggcacatccgcaccgtcttcaagttttatcagtcctcaaacaagaggctgaacgagctgcaggaaggtgcggcgcctctggagcaggagatcatccgcctgaaggatctgaatgcggtccgctgggtggccagcaggaggcgcacgctgcacgcgctgctcgtgagctggcccgccctggccaggcacctccagagggtggcagaggctgggggccagattgggcaccgggccaaagggatgctgaagctcatgcgcggcttccactttgtcaagttctgccacttcctgttggacttcctgagcatctacaggcctctgtccgaggtgtgccagaaggagatcgtgctgattacagaggtgaacgccacgctgggccgcgcctacgtggcactggagagcctccgtcaccaggcagggcccaaagaggaagaattcaacgccagcttcaaggatgggcggctccacggcatctgcttggacaaactggaggtagcggaacagcggttccaggcggatagggagaggacagtcctgacggggattgagtacctccagcagaggtttgacgcagaccgacccccacagctgaagaacatggaggtgtttgacaccatggcctggccaagtgggattgaacttgccagttttgggaatgatgacattctcaacctggccaggtatttcgagtgctccctcccaacaggatacagtgaggaagctctgctggaggagtggctgggcctgaaaaccattgcccagcacctcccgttctccatgctctgcaaaaacgccctggcccagcactgccgcttccccctgctaagcaagctcatggccgtggtggtctgtgtgcccatctccacctcttgctgtgagcgggggttcaaggccatgaaccgaatcaggaccgatgagaggaccaagctctccaacgaggtgctcaacatgctcatgatgacagctgtgaacggcgtggccgtcacggagtacgacccccagcccgccatccagcactggtacctgacctcctcaggccggcgtttcagccatgtctacacctgtgcccaggtgccagcccgctcccctgcaagtaagtacacgtggcagagctcccccaaggcagcctcatgctgagccagaggccaataagacaggactgcaggtgcctgtggagcttctgtcatgcacccacccatttgctaggccagtgggtactcgatgcgtgacatccaccctccaggagcttgcacccctgccagggagatgacgcacatgtgctctaggcagcagggcttagtgcagagagcgtgcatttctagagcctgtctgccctggtgacagtgctgtgctggctctgcccccaactggctgtgtggccttgggcaagtctgtcctttgatgccttggtttctcatctgccgaatgagttgtgtgtggaaaacactcaggacaatgcctggcaggtggtgcaaatggtactagttaaaggtcaagaccactgctgggagtaaggagagggctgaccagccccaggcagcgccatcacattctaagtggggctgtatagactctggaccgtgcaggaattttcaagagggaagaggtccatgtggctgtggaggaggtgagatgcggaggagatggtggggctttcaggcagaaatctcacggggcaggggagaacagaaacagcctctctggaccggagggctggggtcaagaacttgcttgagggggaagctgtattagaagggagggcaagttactgaaagccacagacaggaaatttttctcttcaagtagtcactgaaaaccaaagaaaatatgcccattgttggggttctccagaccactcgcgaccacttgacaaggatggagcagtgctctctctcctcgcgtctctagctggcctccttccggctgttgctgctcccagtgctctctctcctcgcgtctctagctggcctccttccggctgttgctgctcccagttttcacctctgagtctgtggtcaccagaaatgggactggatctcatggctgacagaggctctgtaggaagcaaggtggccctgaagccacagtagggcaggtggggataagaaaagagacccctcactgataagagaaagggaaagccgagagagggctgggtgagttgctctgtgtccagccctgtgggtgctaaggagaaaaaaatgatgtcaggtgtgccctgatgcgagttactctttccacagggacaacaggaccagcacagattggtccaaacactgccaaactacgcaccgctgcctccttccaggcagggctctcagccttggcattgttgatgctggggctgggtaatctctgttgggggcccttcctgttcactgtgggaacttgagcagcatccatggcctctacctattagataaccactggataccagtagcacacaccccatttgtgaccacaaaaatcatctccagacattggcaaatggcccctgggggacaaaatcgcccccagttgagatcccctatctcaggataaaagaatgaacagagtagcaacagatgagggctgcaaagagcagtcgtggtcctgacttcagtctgttctgccaagctttcctcaccaaacagcccctgggcgaagctggatgtggaaggcggtcactgtcagtcagtctaattgtattctccttcctccctcacaggcgccaggctcaggaaggaggagatgggagccctctatgtggaggagcccaggacccagaagccacccatcctgccctccagggaagcagcggaggttctgaaggactgcatcatggagcctcccgagagactcctgtatccccacaccagccaggaggcccccgggatgtcctgagggacagggagtccttgggactgccttggagacgcctctgtgatcactgggacaggctctgcagattctaggctgccctaggatcttctgctggtggcgatggtctctaagcaccaggaagtgggcagtggcatcccagagcagcaggggtatcaggaggtgcatgacctgtttcctgaggccccactcagcacagccatgcctcacagcacacaaatgtgccagaaggttctatatctcaagttcatttttaaggtgctgcagaaaataaccccatcatgaaaggtttcagcccctgagttttggtggcaagaggagtgtcctggtaggggagactgttggacatccctggggaatgttccagggaggctgcccacagtctaagtgggaatgggaaagaccaccttgttagagggggaggttgcccctgctctagggacagctggcctggctgcaagagcccccagaggcattgttctgggacttcctaccctggctcccacagcagaagcagtgaggccgtggtctcgtgcggaactctacctcttcccagggcttcctttagggcgaaacaatcacaagccctttgcacagagcacccaagaaagttctcttcctgcagctccagatggtggagctgggctcttctggcagggggtctggtgcttcccggagagccgagccgcgtttaacccgtggcatgcccggcccggtttacccaggagaggatgggacgaagttggagttgggaggcttgggatgcagccccagctctgctgcaggcagtggtctgattaatcccttcctctttgtgcctcagtttccctctccatgaagtggcagcagagatccaagtgcctgctgactccccatctgccctaggattagtgaatgagagcctcgagctccctcaaagacctctggctgcagtgtggacttagctgccatctgccccatcctcgtccttagtgggacaggtaggaatttgtctccaaagtccttgttgtaggagttgctctctgaatgcaccatctgcacgacaggctagtccactcttctctgagctgccctggggactctgcaccaggatctccagggcccactgagacatccccgaatgggcgctcagtgacaagggctttgaacaacctcctccagggactttgggcctgctctagcttcagaaccacagaaccaccgccctagaggcacagaggggcttctggcactgctaggttcacaccctcctcgccccgatcttccttccacctaaagtgaagcacttttccttccaagggcagctccgtcttggcaggctcaggaggccgcttatcaggaggaggatgattttgtctaggttctgccttccttaaccatgggcaggaaatgaggcaagtcagcaggcagggtttctctgccctgcctgatacttgttttaaacaggcaggaagtgggcgccatccatcccagcttgcttgctgcctggctcaggcaggtcctgtgctgtgctgcaggcccctgtgggtgggccctttctccatagtctgccgcttcccattcccagggtagatgctggcatctgagcacctgagtacccttcctattcccagggtagaagctgctgtctgagtacccttcccattcccagggtagatgctggcatctgagcacctgagtacccttcctattcccagggtagaagctgctgtctgagtacccttcccattcccagggtagatgctggcgtccgagcccctccctggtaccgcaggtaccctggtaccccacctgccctttcatccccaccccagtacttagccttagcactgttgctttcgtgtcattttcagttctagtcaggaattcctttcttgctttctgcctttgacctgtggaaatgtctcccagccctgtgggtctggcggtcagagggaccccacaggcctgtggtgcgggagctctgggaggtgttactatctgcgtggctaaggcacacacaggcctccttctccccatcaccgtctccatgggcgttcaggaacttgcccaggtcaggcactgtggatgtgaactcgtggaaagggagggagaaaggcttttttaggtggggctatagcctctgccctacccacagggattccacatcaaggtgctgttccagcacacatgcttcctgcggcctcttcatccttgaagaatccctcagagcaggaggccatcctgtgagcagccgtgagtgggtctctgtgggagtagttctggagctgaggtggaagctaggggaagcaactcgccctctccacgtcagcatcagcgtgctccgaggacaccggccagtgccttccttaggtggtgggaaaggggggtccctgtgcagcggggccactgagaatgctgtttgtcataaaatttgcactacccgatttctcaaggggcacaggcctgctccgttcccctttgtcagccaatggccaagaaggaagaagatgactgccatcttattcctgaacttcctcattcaggacccccgtggaaacacagtgagcatccttatcagaggccctggcccaggctggcccctttgctttgtttggagaggctggctgagtttcagcccctagtgctggagacccccttgttggagaggcttcctgtttatgcctcacaagaagaaaaaccacagggctctgggaggggaagaagcatgcactcccgctttggctggagtcccagcgcttgtcgccaccctcctccttgcctgtagtcttgacagcatccgtatgtacgtgtcctggcatttcccctccctctccctgatgactgatacccaccgggtctgacattccaagtaaccagtatgtaactggtagtttgatcccaatagccatagcgactccaggtgggagtgagggagcccagccccctgtcctggaagataccttagagtatgtgaccgcgctccagacccttgcttctctctcctgcagaggatgagtttctagggtgctaagtacctatcagaacagtgtggaggggcgggtccctcatacaggtgtgtgcttagccaaatacagtaactgtgactggcccagggatgttctctcctctattttcaaagatgaaaggaggttttaaaaaccatgtttgattcctaaccttttgctacctgaataaagcagagtctatttcaacacatctctgtcttgtgtgtccctaagcgaggaccaggagctcagagaagctgacagaacgagctctgctctcactcacgaggggacagggccaggaacagaggtgggcaggggaagtgcctgtgtattcacctgatttttgtctttcagtttctttcctctctagtccttcaaagtgagctcaatcatttttgccagttagaaggtaaagatgagagttggctgtttggtgagttataattaagggcttggctgccttttctggagtactgcatagtttacaaagtgctttcacatacatgatctaatttggtttactgaacttagaaaggtagactttcaaggaaaaaacatcgatttccaccaatagtaaaagctactgcatcagacctgtcactcaacagcgctccttgaggcctagctcctgagatccctctggcgagcccttgcggctccacatcctcgggacggcacgctcccacgggactggagcaaaggtttcagagactcgggatacagccagatctcttcggtgaggagactcagtcttactcgagtgtatgtgatttttaaaaaagacattgaaacaactatggaaacagaggcaaaggcagcaaggctttgggtttgcgactgggaatccgtgcggcctccctttggtgaagacctgaccccgtggtgggggtgaacagggtttccttgaccccgtcccagggttcccttcaggacagatggatttcactaggggaagcgtgatgctggtagcctccactctcaggctgggcagggtaggctcccagggaggcagctcccagcgcagcctcttccatcactccggctggagctagaaggagagaagtgagctgaggctctagaaagtgctgcactcctgcctttctttttcccaagggtgctcttgacatctggagtgcagtcagcaggcctttccgagtgggctggctgcctcagatgcctcagtccctgttgctggggatgcttcggtggggcctcctcactgtgggccttctcttgggtcagtgtgatcctcgtgtcccttccctgtgccagcgacactcgtgggcttcacgtggctggcccctgctcccagggctcttgagatgctgcctctgactgcagctcctgccacactggcacctgtgtggccgctgctcccctctgcacctgggaatagctgcccagagacttcctgttttgaaccttttgccttgctcaggcagccagcaagggccctggcactcacaacagaagggccctgcagtgctgcggctctgctggcgggccaggacaagctgtggggcgcagacacactgggcacactccagacaggcacagggcctctgggcagtgagtttgcaagtgttttgtggtcctggatcatgcacaggcttcttggcagccaggagaggctgtctctgcatttagtgtgcacacctgaaagagcggcccctcacccactaggcagtgtcctcccacatccccaggagggtcttcctgtgccatctgaggtccacttagtggaaagcctttgccacaccaggacactttcaggactactcccccacgtggctgtgctcatggtggccagggctatatggctcttgaagctctccacacacttggcacagatggatggcttttccagtggaatcaaaaggactcaggcattctgaggccagtctggccttggggtttttcagcttcccagaagcctgcagaatcgttctggggggttcccagttgcctccagaatcatcttcagtcttgtttctgactgtgttaccaaatactgtggaagaaactcagatgttagcctagtgatggggacacacttcttttgttcagtgtgacctgctcagcctctagcccccagccccagcgagatgacggataaggcagcgtcctgtggatgccagagccggggccaagtgtgggtcagcatcccagctcagaggagcggcccagtttgtctgagaacactgaagtcccagagccctggggaggggcttctgaccagcactcctcctgctctcattccaacacacacaaagggaatgtcctggtccagggagccagggctctcttgctgccatgtgaataattccctgtagcagccactgctagacagcaagcttgggaagccttcttatgcagaaatcaaagtcatttttataaaaagtgtcacagagtcccttatgaagacagctggacagagcaggagccgacccttccctgactgcccagttcagtgagcccggtaaaatatctgccgtcagcagcctgccatgaggtgcagtgaggaccttctacttcatccctccaagctgagtcgtatcataaaatgcatactttatgttccttctgcctgtagagaatcagaaagcacatgatggaggtttcagaaaagggcttgtgagatcgagcatgtcagagctgaagatctgtgtctgtgagacatgtcctcctgaaagagcacacatgagctgacatagccacggcgccggattgccctcaccctgattgtcccatcagtgtagcttgtctcaagaggtttacactgtggctgtgtttctcacaggttacccaaactcctatcataaaggcaggaaacagaagtaaaaaacctgaatccaaaccacaggaagtgctgcggagatactgattcgtgggttgatcagagcccaggaggcactaaaggctcaatgaacatggtgatctttgtgcaagagatgttccatcaaggcttacctggctgggtggtagctttttggcctctgttgggggctgggaatccttcacccaaagctcatgttccctttcaagtctacaagtgatctctggtttggcagcagcatgcactgtagggagaaagacagcccagtgcccctcaacccacactgagcgcacatagacccgtgtcagtcctgaagcctgacttgcaccacccatttaatgccctgggctcaccctatcaatttgggacagcgggggtaggttgtaaacctaagagagctccagaagtaggcagggcctggcatacaggtagggatgtttatttcagggcaacttcaggagtgccaagggctgataaaacagtgcaattgtcataatatgttttcccactgccagggcccttgaaggagaaacaggctcaactagtcacagagacaaccatgctctgggtctagttctccctgaccccacaggccaggagtgcccctattagatggcaagcaagcaaggggccaaggtcctcacccagcaagactcccagctcctaattccttcttatcacatcctggtataattccttctactcatggccaccagaacaatgggtggaaggtaggtggttacatcattaaatgtcacaggccttatttgcaaagacagagacatctggagctgttgttctcacctccgacacgtgccccgtctgcagagagcattaggatgcatctgtggctctgaggtgtgatttcctagggccttcaagtgtcctggggctcctgttcatttgcactgggggacactcagggaagttttaaagagcctctttcagtggctccttctccttctaccctttctaggaattcatcagccccatgaaaagatgaacgatagagatgtcaccaacatcaggaccccactccctgggagatgtcatggaaacttgtcaatcacacccaaagcactcactgaggagccatggcagagcagtcggtggcgccaataccaaccagaagccgccagggcagaggggaaccgtgaagccagtggaatgcacagctccacctcaggggaccggggtaggcggggctgtgtctggtaacatgccctttgcctcacattagtgcctctgaaaatagtgtcctcagcctgggcacaaaccctaggggtgagctgggagtgtggaggagacgctggattagggagaagtctcggccatgtgttctggctcttttactgatgagctgtgtgggcctaggcaagttacttcacttctctgggcctcagttttatcacctgtaaagtgataggattgccttagcctctaagatccctttcagctaaaaacaaagttctagaaaataaatatgtggtactgtggaactctggggagctgtttgatcaggtgaacagtttacccatggaaatggggctccagcacaaagctgctcacatcttccagtcacgctccagggaacagccagggcttgtgggcccagatgaggctttagtggttggagaaggagccagttcctggttttaatcccttcatggacctcagaccatcacaaagctgccaaacaaatgacacaggcaatcacatgcaaattaggacagaaatgaaacatcaaagacattaaaggaaaagagtaagagctgcaggctgctaatatgagtggctgctcagactcagcaatgtttttggttctggccaaagccaagacaaaggagcagaggcaaagaaggaaatacatttcactttacagctgtcattttctacagaggatttttttttttccagaacaaaattcaaaaagtccgtcttttttgagctatagaactttcgtggtgattttttttttttttttttttttgagacggagtctcactctgtcccccaggctggagtgcaggggcacaatctcggctcactgcaagtgcaagctctgcctcccgggttcacgccattctcctttcagcctccaaagtagctaggactacaggtgcccgccaccatgcccagctaatttttttatatttttagtagagacggggtttcaccgtgttagccaggatggtctcgatctcctgacctcgtgatccgcccgcctctgcctcccatagtgctgggattacaggtgtgagccactgcgctcagccctcgtggtgattttttgaaggcctgtatggacatactcttaactctatctcctggatgccaagtgcacccttatcctaggccagtgttctcaacaatgtacacactctggatgagaaaaataaccattgtttacaatccagctaaaatctcacctcctccagggagtcttcctggatttctccaccctctgaattctcataatgggcatttggctactttgatcacagggctcttagaactgcgctgtccagcattatgattttaccagaatatatcactcctcaactactttagaaacccctcgaaggctaggatggtattttatacctaacagtttggtgtcatcccacgcccacctccaacttacatgaatgttggaaggatggatagggaggtttcaactagagaacggagaagggcggatgtaactggttcttgatttcagaaaacagccaggagcacacatggctgacggggtcagtgcaaggacaggcacatttcccttctgcatcacgtggggactgcgcctccctatgtcatgaagccagggaatatgtgtggccggccgcttggggtagcacttgttgctagagataccgcctggaggccactgatctgtaaaagggatctctacagaagatagggatttttgatcgccagagaagaagggatatgtgagatc

SEQ ID NO: 152 - protein, 234 aa, Homo sapiens
MSCINLPTVLPGSPSKTRGQIQVILGPMFSGKSTELMRRVRRFQIAQYKCLVIKYAKDTRYSSSFCTHDRNTMEALPACLLRDVAQEALGVAVIGIDEGQFFPDIMEFCEAMANAGKTVIVAALDGTFQRKPFGAILNLVPLAESVVKLTAVCMECFREAAYTKRLGTEKEVEVIGGADKYHSVCRLCYFKKASGQPAGPDNKENCPVPGKPGEAVAARKLFAPQQILQCSPAN

SEQ ID NO: 153 - DNA, 1421 bp, Homo sapiens
acttactgcgggacggccttggagagtactcgggttcgtgaacttcccggaggcgcaatgagctgcattaacctgcccactgtgctgcccggctcccccagcaagacccgggggcagatccaggtgattctcgggccgatgttctcaggaaaaagcacagagttgatgagacgcgtccgtcgcttccagattgctcagtacaagtgcctggtgatcaagtatgccaaagacactcgctacagcagcagcttctgcacacatgaccggaacaccatggaggcgctgcccgcctgcctgctccgagacgtggcccaggaggccctgggcgtggctgtcataggcatcgacgaggggcagtttttccctgacatcatggagttctgcgaggccatggccaacgccgggaagaccgtaattgtggctgcactggatgggaccttccagaggaagccatttggggccatcctgaacctggtgccgctggccgagagcgtggtgaagctgacggcggtgtgcatggagtgcttccgggaagccgcctataccaagaggctcggcacagagaaggaggtcgaggtgattgggggagcagacaagtaccactccgtgtgtcggctctgctacttcaagaaggcctcaggccagcctgccgggccggacaacaaagagaactgcccagtgccaggaaagccaggggaagccgtggctgccaggaagctctttgccccacagcagattctgcaatgcagccctgccaactgagggacctgcaagggccgcccgctcccttcctgccactgccgcctactggacgctgccctgcatgctgcccagccactccaggaggaagtcgggaggcgtggagggtgaccacaccttggccttctgggaactctcctttgtgtggctgccccacctgccgcatgctccctcctctcctacccactggtctgcttaaagcttccctctcagctgctgggacgatcgcccaggctggagctggccccgcttggtggcctgggatctggcacactccctctccttggggtgagggacagagccccacgctgttgacatcagcctgcttcttcccctctgcggctttcactgctgagtttctgttctccctgggaagcctgtgccagcacctttgagccttggcccacactgaggcttaggcctctctgcctgggatgggctcccaccctcccctgaggatggcctggattcacgccctcttgtttccttttgggctcaaagcccttcctacctctggtgatggtttccacaggaacaacagcatctttcaccaagatgggtggcaccaaccttgctgggacttggatcccaggggcttatctcttcaagtgtggagagggcagggtccacgcctctgctgtagcttatgaaattaactaatt

SEQ ID NO: 154 - protein, 228 aa, Homo sapiens
MSVPGPYQAATGPSSAPSAPPSYEETVAVNSYYPTPPAPMPGPTTGLVTGPDGKGMNPPSYYTQPAPIPNNNPITVQTVYVQHPITFLDRPIQMCCPSCNKMIVSQLSYNAGALTWLSCGSLCLLGVHSGLLLHPLLRGCPAGRGPLLSQLQSSPGHLQAFVGLSQTWREPGAAGSPFHLSSSFTPGGGSALVVSPLQGAHLHVFFWGEYVAKLTNLQTPEIAAWSRA

SEQ ID NO: 155 - DNA, 1773 bp, Homo sapiens
gtttctctccctgcccccgcgacttcgcgcaagatccgggaaggacacccgaggcccctgggagaccctggggaggtgaaagtcagagagcgaagcgggccgtggcccctaggcctgacccctccccgcggggtaaggcgggcaccccgcgagcgcaggggtcctcttactgctgatggcacccagctctgggcccagacgccgctcaccgtccaccgccggtgctgggtaaaatgtcggttccaggaccttaccaggcggccactgggccttcctcagcaccatccgcacctccatcctatgaagagacagtggctgttaacagttattaccccacacctccagctcccatgcctgggccaactacggggcttgtgacggggcctgatgggaagggcatgaatcctccttcgtattatacccagccagcgcccatccccaataacaatccaattaccgtgcagacggtctacgtgcagcaccccatcacctttttggaccgccctatccaaatgtgttgtccttcctgcaacaagatgatcgtgagtcagctgtcctataacgccggtgctctgacctggctgtcctgcgggagcctgtgcctgctgggggtgcatagcgggctgctgcttcatccccttctgcgtggatgccctgcaggacgtggaccattactgtcccaactgcagagctctcctgggcacctacaagcgtttgtaggactcagccagacgtggagggagccgggtgccgcaggaagtcctttccacctctcatccagcttcacgcctggtggaggttctgccctggtggtctcacctctccagggggcccaccttcatgtcttcttttggggggaatacgtcgcaaaactaacaaatctccaaaccccagaaattgctgcttggagtcgtgcataggacttgcaaagacattccccttgagtgtcagttccacggtttcctgcctccctgagaccctgagtcctgccatctaactgtgatcattgccctatccgaatatcttcctgtgatctgccatcagtggctcttttttcctgcttccatgggcctttctggtggcagtctcaaactgagaagccacagttgccttatttttgaggctgttctgcccagagctcggctgaaccagcctttagtgcctaccattatcttatccgtctcttcccgtccctgatgacaaagatcttgccttacagactttacaggcttggctttgagattctgtaactgcagacttcattagcacacagattcactttaatttcttaattttttttttaaatacaaggagggggctattaacacccagtacagacatatccacaaggtcgtaaatgcatgctagaaaaatagggctggatcttatcactgccctgtctccccttgtttctctgtgccagatcttcagtgcccctttccatacagggatttttttctcatagagtaattatatgaacagtttttatgacctccttttggtctgaaatacttttgaacagaatttcttttttttaaaaaaaaacagagatggggtcttactatgttgcccaggctggtgtcgaactcctgggctcaagcgatccttctgccttggcctcccgaagtgctgggattgcaggcataagctaccatgctgggcctgaacataatttcaagaggaggatttataaaaccattttctgtaatcaaatgattggtgtcattttcccatttgccaatgtagtctcacttaaaaaaaaaaaaaaaaaaa

SEQ ID NO: 156 - protein, 399 aa, Homo sapiens
MKMRFLGLVVCLVLWPLHSEGSGGKLTAVDPETNMNVSEIISYWGFPSEEYLVETEDGYILCLNRIPHGRKNHSDKGPKPVVFLQHGLLADSSNWVTNLANSSLGFILADAGFDVWMGNSRGNTWSRKHKTLSVSQDEFWAFSYDEMAKYDLPASINFILNKTGQEQVYYVGHSQGTTIGFIAFSQIPELAKRIKMFFALGPVASVAFCTSPMAKLGRLPDHLIKDLFGDKEFLPQSAFLKWLGTHVCTHVILKELCGNLCFLLCGFNERNLNMSRVDVYTTHSPAGTSVQNMLHWSQAVKFQKFQAFDWGSSAKNYFHYNQSYPPTYNVKDMLVPTAVWSGGHDWLADVYDVNILLTQITNLVFHESIPEWEHLDFIWGLDAPWRLYNKIINLMRKYQ

SEQ ID NO: 157 - DNA, 2493 bp, Homo sapiens
actgcgactcgagacagcggcccggcaggacagctccagaatgaaaatgcggttcttggggttggtggtctgtttggttctctggcccctgcattctgaggggtctggagggaaactgacagctgtggatcctgaaacaaacatgaatgtgagtgaaattatctcttactggggattccctagtgaggaatacctagttgagacagaagatggatatattctgtgccttaaccgaattcctcatgggaggaagaaccattctgacaaaggtcccaaaccagttgtcttcctgcaacatggcttgctggcagattctagtaactgggtcacaaaccttgccaacagcagcctgggcttcattcttgctgatgctggttttgacgtgtggatgggcaacagcagaggaaatacctggtctcggaaacataagacactctcagtttctcaggatgaattctgggctttcagttatgatgagatggcaaaatatgacctaccagcttccattaacttcattctgaataaaactggccaagaacaagtgtattatgtgggtcattctcaaggcaccactataggttttatagcattttcacagatccctgagctggctaaaaggattaaaatgttttttgccctgggtcctgtggcttccgtcgccttctgtactagccctatggccaaattaggacgattaccagatcatctcattaaggacttatttggagacaaagaatttcttccccagagtgcgtttttgaagtggctgggtacccacgtttgcactcatgtcatactgaaggagctctgtggaaatctctgttttcttctgtgtggatttaatgagagaaatttaaatatgtctagagtggatgtatatacaacacattctcctgctggaacttctgtgcaaaacatgttacactggagccaggctgttaaattccaaaagtttcaagcctttgactggggaagcagtgccaagaattattttcattacaaccagagttatcctcccacatacaatgtgaaggacatgcttgtgccgactgcagtctggagcgggggtcacgactggcttgcagatgtctacgacgtcaatatcttactgactcagatcaccaacttggtgttccatgagagcattccggaatgggagcatcttgacttcatttggggcctggatgccccttggaggctttataataaaattattaatctaatgaggaaatatcagtgaaagctggacttgagctgtgtaccaccaagtcaatgattatgtcatgtgaaaatgtgtttgcttcatttctgtaaaacacttgtttttctttcccaggtcttttgtttttttatatccaagaaaatgataactttgaagatgcccagttcactctagtttcaattagaaacatactagctattttttctttaattagggctggaataggaagccagtgtctcaaccatagtattgtctctttaagtcttttaaatatcactgatgtgtaaaaaggtcattatatccattctgtttttaaaatttaaaatatattgactttttgcccttcataggacaaagtaatatatgtgttggaattttaaaattgtgttgtcattggtaaatctgtcactgacttaagcgaggtataaaagtacgcagttttcatgtccttgccttaaagagctctctagtctaacggtcttgtagttagagatctaaatgacattttatcatgttttcctgcagcaggtgcatagtcaaatccagaaatatcacagctgtgccagtaataaggatgctaacaattaattttatcaaacctaactgtgacagctgtgatttgacacgttttaattgctcaggttaaatgaaatagttttccggcgtcttcaaaaacaaattgcactgataaaacaaaaacaaaagtatgttttaaatgctttgaagactgatacactcaaccatctatattcatgagctctcaatttcatggcaggccatagttctacttatctgagaagcaaatccctgtggagactataccactattttttctgagattaatgtactcttggagcccgctactgtcgttattgatcacatctgtgtgaagccaaagccccgtggttgcccatgagaagtgtccttgttcattttcacccaaatgaagtgtgaacgtgatgttttcggatgcaaactcagctcagggattcattttgtgtcttagttttatatgcatccttatttttaatacacctgcttcacgtccctatgttgggaagtccatatttgtctgcttttcttgcagcatcatttccttacaatactgtccggtggacaaaatgacaattgatatgtttttctgatataattactttagctgcactaacagtacaatgcttgttaatggttaatataggcagggcgaatactactttgtaacttttaaagtcttaaacttttcaataaaattgagtgagacttataggccc

SEQ ID NO: 158 - protein, 863 aa, Homo sapiens
MQRRGALFGMPGGSGGRKMAAGDIGELLVPHMPTIRVPRSGDRVYKNECAFSYDSPNSEGGLYVCMNTFLAFGREHVERHFRKTGQSVYMHLKRHAREKVRGASGGALPKRRNSKIFLDLDTDDDLNSDDYEYEDEAKLVIFPDHYEIALPNIEELPALVTIACDAVLSSKSPYRKQDPDTWENELPVSKYANNLTQLDNGVRIPPSGWKCARCDLRENLWLNLTDGSVLCGKWFFDSSGGNGHALEHYRDMGYPLAVKLGTITPDGADVYSFQEEEPVLDPHLAKHLAHFGIDMLHMHGTENGLQDNDIKLRVSEWEVIQESGTKLKPMYGPGYTGLKNLGNSCYLSSVMQAIFSIPEFQRAYVGNLPRIFDYSPLDPTQDFNTQMTKLGHGLLSGQYSKPPVKSELIEQVMKEEHKPQQNGISPRMFKAFVSKSHPEFSSNRQQDAQEFFLHLVNLVERNRIGSENPSDVFRFLVEERIQCCQTRKVRYTERVDYLMQLPVAMEAATNKDELIAYELTRREAEANRRPLPELVRAKIPFSACLQAFSEPENVDDFWSSALQAKSAGVKTSRFASFPEYLVVQIKKFTFGLDWVPKKFDVSIDMPDLLDINHLRARGLQPGEEELPDISPPIVIPDDSKDRLMNQLIDPSDIDESSVMQLAEMGFPLEACRKAVYFTGNMGAEVAFNWIIVHMEEPDFAEPLTMPGYGGAASAGASVFGASGLDNQPPEEIVAIITSMGFQRNQAIQALRATNNNLERALDWIFSHPEFEEDSDFVIEMENNANANIISEAKPEGPRVKDGSGTYELFAFISHMGTSTMSGHYICHIKKEGRWVIYNDHKVCASERPPKDLGYMYFYRRIPS

SEQ ID NO: 159 - DNA, 2738 bp, Homo sapiens
cgcggaattccgcggaattccgcgccgccgccgccggcagaccccgcgctccggctccggctcggctcgctcggctccggtgcgcgccgaggccatgcagcgccggggcgccctgttcggcatgccgggcggcagcggaggcaggaagatggctgcaggagacatcggcgagctgctagtgccccacatgcccacgatccgcgtgcccaggtccggcgacagggtctacaagaacgagtgcgccttctcctacgactctcccaattctgaaggtggactctatgtatgcatgaatacatttttggcctttggaagggaacatgttgaaagacattttcgaaaaactggacagagtgtatacatgcacctgaaaagacatgcgcgagagaaggtaagaggggcgtctggtggagcgttaccaaaaaggaggaattccaagatttttttagatctagatactgatgacgatttaaatagcgacgattatgaatatgaagatgaagccaaacttgttatattcccagatcactatgaaatagcactaccaaatattgaggagttaccagccctggtaacaattgcttgtgatgcagttctcagctcaaaatctccatacagaaagcaggacccagacacgtgggaaaatgaattgccagtatctaaatatgccaacaacctcacccagctggacaatggagtcaggattcctccaagtggttggaagtgtgccagatgcgacctgcgagaaaacctctggttgaatctgactgacggctctgtcctgtgtggaaagtggttctttgacagctctgggggcaacgggcatgcgctggagcattacagagacatgggctacccactagccgtgaaactgggaaccatcactcctgacggggcagatgtttattcttttcaagaagaagaacctgttttggatcctcatttggccaagcacttagcgcattttggaattgatatgcttcatatgcatgggacagagaatgggctccaggacaatgacatcaagctgagggtcagtgagtgggaagtgatccaggagtcgggcacgaaactgaagccaatgtatggtcctggctacacgggtctgaagaacctgggcaacagctgctatctcagctctgtcatgcaggccatcttcagcatcccagaattccagagagcgtatgtaggaaaccttcccagaatatttgactactcgcctttagatccaacacaagatttcaacacacagatgactaagttaggacatggccttctctcaggccagtattcaaagcctccggtgaaatctgaactcattgaacaggtgatgaaggaggagcacaagccacagcagaacgggatctctccgcgcatgtttaaggcctttgtaagcaagagccacccggaattctcctctaacaggcagcaagatgcccaggaattcttcttgcacctggtgaatctagtagagaggaaccgcatcggctcagaaaacccaagcgatgtttttcgttttttggtggaagaacgcattcagtgctgtcagacccggaaagtccgctacacggagagggtggattacctgatgcagttacctgtggccatggaggcggcaaccaacaaggatgaactgatcgcttatgaactaacgagaagggaagcagaagcaaacagaagaccccttcctgagttggtacgtgccaagataccatttagtgcctgccttcaggccttctctgaaccagaaaatgttgatgatttctggagcagtgccctacaagcaaagtctgcgggtgtgaaaacatctcgctttgcttcattccctgaatacttggtagtgcagataaagaagttcacttttggtcttgactgggttcccaaaaaatttgatgtttctattgatatgccagacctacttgatatcaaccatctccgagccagggggttacagccaggagaggaagaacttccagacatcagcccccccatagtcattcctgatgactcaaaagatcgcctgatgaaccaattgatagacccatcagacatcgatgagtcatcagtgatgcagctggccgagatgggtttcccgctggaagcatgtcgcaaggctgtgtacttcactggaaatatgggcgccgaggtggccttcaactggatcattgttcacatggaagagccagattttgctgagccgctgaccatgcctggttatggaggggcagcttctgctggagcctctgtttttggtgcttctggactggataaccaacctccagaggaaatcgtagctatcatcacctccatgggatttcagcgaaatcaggctattcaggcactacgagcaacgaataataacctggaaagagcactggattggatctttagccaccctgagtttgaagaagacagtgattttgtgattgagatggagaataatgccaatgcaaacattatttctgaggccaagcccgaaggacctagagtcaaggatggatctggaacatatgagctatttgcattcatcagtcacatgggaacatccacaatgagtggtcattacatttgccatatcaaaaaggaaggaagatgggtgatttacaatgaccacaaagtttgtgcctcagaaaggccccctaaagacctgggctacatgtacttttaccgcaggataccaagctaaacctcaaatataaaaattggcgaaaagaagccatacgcctttttaatttgcc

SEQ ID NO: 160 - protein, 526 aa, Homo sapiens
MGHLSAPLHRVRVPWQGLLLTASLLTFWNPPTTAQLTTESMPFNVAEGKEVLLLVHNLPQQLFGYSWYKGERVDGNRQIVGYAIGTQQATPGPANSGRETIYPNASLLIQNVTQNDTGFYTLQVIKSDLVNEEATGQFHVYPELPKPSISSNNSNPVEDKDAVAFTCEPETQDTTYLWWINNQSLPVSPRLQLSNGNRTLTLLSVTRNDTGPYECEIQNPVSANRSDPVTLNVTYGPDTPTISPSDTYYRPGANLSLSCYAASNPPAQYSWLINGTFQQSTQELFIPNITVNNSGSYTCHANNSVTGCNRTTVKTIIVTELSPVVAKPQIKASKTTVTGDKDSVNLTCSTNDTGISIRWFFKNQSLPSSERMKLSQGNTTLSINPVKREDAGTYWCEVFNPISKNQSDPIMLNVNYNALPQENGLSPGAIAGIVIGVVALVALIAVALACFLHFGKTGRASDQRDLTEHKPSVSNHTQDHSNDPPNKMNEVTYSTLNFEAQQPTQPTSASPSLTATEIIYSEVKKQ

SEQ ID NO: 161 - DNA, 3464 bp, Homo sapiens
cagccgtgctcgaagcgttcctggagcccaagctctcctccacaggtgaagacagggccagcaggagacaccatggggcacctctcagccccacttcacagagtgcgtgtaccctggcaggggcttctgctcacagcctcacttctaaccttctggaacccgcccaccactgcccagctcactactgaatccatgccattcaatgttgcagaggggaaggaggttcttctccttgtccacaatctgccccagcaactttttggctacagctggtacaaaggggaaagagtggatggcaaccgtcaaattgtaggatatgcaataggaactcaacaagctaccccagggcccgcaaacagcggtcgagagacaatataccccaatgcatccctgctgatccagaacgtcacccagaatgacacaggattctacaccctacaagtcataaagtcagatcttgtgaatgaagaagcaactggacagttccatgtatacccggagctgcccaagccctccatctccagcaacaactccaaccctgtggaggacaaggatgctgtggccttcacctgtgaacctgagactcaggacacaacctacctgtggtggataaacaatcagagcctcccggtcagtcccaggctgcagctgtccaatggcaacaggaccctcactctactcagtgtcacaaggaatgacacaggaccctatgagtgtgaaatacagaacccagtgagtgcgaaccgcagtgacccagtcaccttgaatgtcacctatggcccggacacccccaccatttccccttcagacacctattaccgtccaggggcaaacctcagcctctcctgctatgcagcctctaacccacctgcacagtactcctggcttatcaatggaacattccagcaaagcacacaagagctctttatccctaacatcactgtgaataatagtggatcctatacctgccacgccaataactcagtcactggctgcaacaggaccacagtcaagacgatcatagtcactgagctaagtccagtagtagcaaagccccaaatcaaagccagcaagaccacagtcacaggagataaggactctgtgaacctgacctgctccacaaatgacactggaatctccatccgttggttcttcaaaaaccagagtctcccgtcctcggagaggatgaagctgtcccagggcaacaccaccctcagcataaaccctgtcaagagggaggatgctgggacgtattggtgtgaggtcttcaacccaatcagtaagaaccaaagcgaccccatcatgctgaacgtaaactataatgctctaccacaagaaaatggcctctcacctggggccattgctggcattgtgattggagtagtggccctggttgctctgatagcagtagccctggcatgttttctgcatttcgggaagaccggcagggcaagcgaccagcgtgatctcacagagcacaaaccctcagtctccaaccacactcaggaccactccaatgacccacctaacaagatgaatgaagttacttattctaccctgaactttgaagcccagcaacccacacaaccaacttcagcctccccatccctaacagccacagaaataatttattcagaagtaaaaaagcagtaatgaaacctgtcctgctcactgcagtgctgatgtatttcaagtctctcaccctcatcactaggagattcctttcccctctagggtagaggggtggggacagaaacaactttctcctactcttccttcctaataggcatctccaggctgcctggtcactgcccctctctcagtgtcaatagatgaaagtacattgggagtctgtaggaaacccaaccttcttgtcattgaaatttggcaaagctgactttgggaaagagggaccagaacttcccctcccttccccttttcccaacctggacttgttttaaacttgcctgttcagagcactcattccttcccacccccagtcctgtcctatcactctaattcggatttgccatagccttgaggttatgtccttttccattaagtacatgtgccaggaaacagcgagagagagaaagtaaacggcagtaatgcttctcctatttctccaaagccttgtgtgaactagcaaagagaagaaaaccaaatatataaccaatagtgaaatgccacaggtttgtccactgtcagggttgtctacctgtaggatcagggtctaagcaccttggtgcttagctagaataccacctaatccttctggcaagcctgtcttcagagaacccactagaagcaactaggaaaaatcacttgccaaaatccaaggcaattcctgatggaaaatgcaaaagcacatatatgttttaatatctttatgggctctgttcaaggcagtgctgagagggaggggttatagcttcaggagggaaccagcttctgataaacacaatctgctaggaacttgggaaaggaatcagagagctgcccttcagcgattatttaaattattgttaaagaatacacaatttggggtattgggatttttctccttttctctgagacattccaccattttaatttttgtaactgcttatttatgtgaaaagggttatttttacttagcttagctatgtcagccaatccgattgccttaggtgaaagaaaccaccgaaatccctcaggtcccttggtcaggagcctctcaagattttttttgtcagaggctccaaatagaaaataagaaaaggttttcttcattcatggctagagctagatttaactcagtttctaggcacctcagaccaatcatcaactaccattctattccatgtttgcacctgtgcattttctgtttgcccccattcactttgtcaggaaaccttggcctctgctaaggtgtatttggtccttgagaagtgggagcaccctacagggacactatcactcatgctggtggcattgtttacagctagaaagctgcactggtgctaatgccccttgggaaatggggctgtgaggaggaggattataacttaggcctagcctcttttaacagcctctgaaatttatcttttcttctatggggcttataaatgtatcttataataaaaaggaaggacaggaggaagacaggcaaatgtacttctcacccagtcttctacacagatggaatctctttggggctaagagaaaggttttattctatattgcttacctgatctcatgttaggcctaagaggctttctccaggaggattagcttggagttctctatactcaggtacctctttcagggttttctaaccctgacacggactgtgcatactttccctcatccatgctgtgctgtgttatttaatttttcctggctaagatcatgtctgaattatgtatgaaaattattctatgtttttataataaaaataatatatcagacatcgaaaaaaaaaa

SEQ ID NO: 162 - DNA, 2722 bp, Homo sapiens
gggagtaggtcagacagggttttcactgtctagatttagctggttagattttcctctaaaatcttaagcagatgctgaatccataaagccaaggagtgctgagggctggagtgggtgggccctccctcccacagccccagggagatacatctggactcctgggaatctggattaagaaagttgggatgaaagaggaggactgctcaggccagttgtgagccagggagaatgttccagtctggttttggtctggtggctcctagaaagggatgtggcccagaagtgggactcaaacagagagatgaagtaggggaggggagtcctccacgggcatctctctcctggcggctggatagctttaccctagggtggggccagccctgacaccctcatcccctcctcagcccagcagcctctagagcagcgtggtgctctcttgatggccaggaatccagaatctgcccttccccaaccttggtttctccttctgtaaagcagagtgatggctgagaagtcctctctagctgcagaagcctgagcttcccggtgtcagtcagctctgcaacgtgggagccttggaggcgggtggcctggctgtgcttcatatgcccaggagtggagaaggaggctgagaagctggtttcccagctctgatctccacaggcacctcctataaccctcctctcacccaccccgctacggtctgagagatctgaaataacctttcccagtgggcagggttgccagggttgaggggacagcacataccacccccacccaacctgttcgaggggccctgcatggcacgggatgagtccctgccctgtgcagctgcctggcagtggctgggacaaggatcttgcagccagcacagaggcctcttcaaaggcctctccctcttggcactccaggcaaggcaggtgcccgcttccccaacacctccaggcagtgaccctagggcatgccccagcaggtctccgagcagccactgggacccgtctcagcacatcctggcctttgaaagtctgatatcctgagaggagggcaggttttagggccgcagttccagccagcgtccccagcctggcttccctgccatggactcagtagctcgtggggcttcttaccacccaccagccccgctggggtgcggcctggctgtgggcaaaggaggacttgcctggagatttgagagaagattccttctaccagggctgctgaggggccaggcctgcatcaggggctaggctctggctgggcccggaggctgagactaaggctttcgaccctggtgcctccatgtggatgctgcctcagacaaaggcagtgagccttccctgccaaagtgcccatcccatgggctcggcctcactggtcactgttagcccatgaacacgtgtgggcctcggtcacgtggctttgagggcagtctgaccaggctagaccacacgtgccgtgacagggggtgccattcccctcgcaggctctaatgtgcccacatgtagcctggcagtccaaagaccaagaatcaacttgcaaatctgccattaaactgctgtgcgacttcaggcatatcactgccttctctgggcttcagtgtccttttcatacctagaagtctgcggtctgaggctctttgggttcagacacactgttctaggcttctgtaggggaccttgtgatctgccgtgcccctcctccctgttcttttctgtcctccccaccccaccctcagaagctgcttgctctgcccccaggacaggagcttgacggatgaagtgcagccagccacccaggtgccatttccagtctgacttccagaaatgtgcaccatgtcctagagcacagacccattggctggagcctcctgggagggttcaaaccatcagctctatgagaaatgcccagaaaggctttgccgactccatccgtctgtggaggctgcctgcctccggggtgggatgggtggtttctcctccaattcagacccaagaggtagcccccgagggcatgtacctggtgggaagcagctcaggtacccttgggggttgcagggcccttacgcaggtatttctctctctctcctctctggggtgcgtgtgtgcgtgcgcgtgtgcgtgcctatgcttttctctgtgggcacatcaggatgcccctcggagagcatgtgcacgtgtccccacctgagcgagcgtgtgtgtgtgctcctctgcgtcccaggtttggacgtctagggtttggtgtgcctgtcttctgccctccctgagcccacagggtcagtcaatgtatcttctacgtgcctctccctctgccttctctcacagtgcccccggctccagagctcaggggtaggggttctcctgagggtgcaggggatccttctcatctcctggaccctccagggcactctggtccctattccccagctcctaggcagctgagccgggtcccttaggggaggtgaccaggagctttggtgcagggagctcttggtggggcaaagggctggacccctgccaggtctgtggacatggttatatgcccgggagaggggggtgcagggccccagggatggcccccaatcccacctctgtttattctgtaaactgcaacctataaataacctttagcattcctattgtaacaaaattaatttttatgaaataaattatatttcctagtctaataaaatccgggttgcatttaaaaaaaaaaaaaaaaa

SEQ ID NO: 163 - protein, 561 aa, Homo sapiens
MRHCINCCIQLLPDGAHKQQVNCQGGPHHGHQACPTCKGENKILFRVDSKQMNLLAVLEVRTEGNENWGGFLRFKKGKRCSLVFGLIIMTLVMASYILSGAHQELLISSPFHYGGFPSNPSLMDSENPSDTKEHHHQSSVNNISYMKDYPSIKLIINSITTRIEFTTRQLPDLEDLKKQELHMFSVIPNKFLPNSKSPCWYEEFSGQNTTDPYLTNSYVLYSKRFRSTFDALRKAFWGHLAHAHGKHFRLRCLPHFYIIGQPKCGTTDLYDRLRLHPEVKFSAIKEPHWWTRKRFGIVRLRDGLRDRYPVEDYLDLFDLAAHQIHQGLQASSAKEQSKMNTIIIGEASASTMWDNNAWTFFYDNSTDGEPPFLTQDFIHAFQPNARLIVMLRDPVERLYSDYLYFASSNKSADDFHEKVTEALQLFENCMLDYSLRACVYNNTLNNAMPVRLQVGLYAVYLLDWLSVFDKQQFLILRLEDHASNVKYTMHKVFQFLNLGPLSEKQEALMTKSPASNARRPEDRNLGPMWPITQKILRDFYRPFNARLAQVLADEAFAWKTT

SEQ ID NO: 164 - DNA, 4712 bp, Homo sapiens
cccggcggtggcggcgtctctggccggccttggtgcggcgagccgagcgaggcagctctgagccgcgcggaaatctggcattttttaaagtttgcgccccacaaagaggaaatattccaaaggtactcaggatgtaaaaggggagatcttcacagatgcctccgtggatggcatggcaatccatccatcaatgagaagaccatgatttcttttaattttctgtgtgtttccacattccccagtgagaattcttccacctttttttgtgccatgggaaaaacctgaagggcaggcagagctgctcccgaacttgtgaccttctctgaggttgcagcggctcttgtagaacatgactctgggacatcacttccttttgttttctttcggagctgaaccaaagaatgtgcaccctctttctctagtgctgtggtgtctgcttatttttgtatttgtgctttccatccatcttctgtgatcacaaggcattcttaaggttttctagcacgacttgcggacatccagactcgtggggggcccacccatggctcggtaagccagcagcccagggcactggcactaccatgaggcactgcattaattgctgcatacagctgttacccgacggcgcacacaagcagcaggtcaactgccaagggggcccccatcacggtcaccaggcgtgccccacgtgcaaaggagaaaacaaaattctgtttcgtgtggacagtaagcagatgaacttgcttgctgttctcgaagtgaggactgaagggaacgaaaactggggtgggtttttgcgcttcaaaaaggggaagcgatgtagcctcgtttttggactgataataatgaccttggtaatggcttcttacatcctttctggggcccaccaagagcttctgatctcatcacctttccattacggaggcttccccagcaaccccagcttgatggacagcgaaaacccaagtgacacaaaggagcatcaccaccaatcctctgtaaataatatttcatacatgaaggactatccaagcattaaattaattatcaacagcatcacaactaggattgagttcacgaccagacagctcccagacttagaagaccttaagaagcaggagttgcatatgttttcagtcatccccaacaaattccttccaaacagtaagagcccctgttggtacgaggagttctcggggcagaacaccaccgacccctacctcaccaactcctacgtgctctactccaagcgcttccgctccaccttcgacgccctgcgcaaggccttctggggccacctggcgcacgcgcacgggaagcacttccgcctgcgctgcctgccgcacttctacatcatagggcagcccaagtgcgggaccacagacctctatgaccgcctgcggctgcaccctgaggtcaagttctccgccatcaaggagccacactggtggacccggaagcgctttggaatcgtccgcctaagagatgggctgcgagaccgctatcccgtggaagattatctggacctctttgacctggccgcacaccagatccatcaaggactgcaggccagctctgcaaaggagcagagcaagatgaatacaatcattatcggggaggccagtgcctccacgatgtgggataataatgcctggacgttcttctacgacaacagcacggatggcgagccaccgtttctgacgcaggacttcatccacgcctttcagccaaatgccagactgattgtcatgctcagggaccctgtggagaggttgtactcagactatctctactttgcaagttcgaataaatccgcggacgacttccatgagaaagtgacagaagcactgcagctgtttgaaaattgcatgcttgattattcactgcgcgcctgcgtctacaacaacaccctcaacaacgccatgcctgtgaggctccaggttgggctctatgctgtgtaccttctggactggctcagcgtttttgacaagcaacagtttctcattcttcgcctggaagatcatgcatccaacgtcaagtacaccatgcacaaggtcttccagtttctgaacctagggcccttaagtgagaagcaggaggctttgatgaccaagagccccgcatccaatgcacggcgtcccgaggaccggaacctggggcccatgtggcccatcacacagaagattctgcgggatttctacaggcccttcaacgctaggctggcgcaggtcctcgcggatgaggcgtttgcgtggaagacgacgtgagagctgaattgttgctgcacgtgctgggcccgccaatgccgtcatcatcaggattttacaaatctctttgcggggaactgtttcactcatggtatggaaaaccccaggactctgccactctaggcacacatgaattataaccattttggaatttccttcgtgatgttcgagagctcagcaatggacccctcacagagctcctctatccgaggccattggagaccccagtttctcaagaattcagctctgctctgagcgtcctggagcttggggatgcagccagctggcctgcactgggtgtggagagaacacctagggaaggcagcctggccctgcccgcctccgccttctggagagcctctgggttctgagtcagcaagccagaggtcatgccacaggcctggctggaacttacacttcacgttccctttttttccccctagagatggggtctcgccgtgttgcacagactgtctgtattcaatggctatcttcacaggtgtgatcataccacattcacttctgaaacactcttgttgcgatcgctaacctcactgggacagagaaccgcagtctttcgagaatggaggctcttcattttttttttctcctttactccaaactcagccctccagtttcttcagatgtaaaccctgttaacgtcactgtttccaaaaggaaaaaaataagtcagtttttggcagcaccttcatctttctgacctcctcctattctgtccttgtggacttatgtttaacatagaaaatgaatgcgtttaaaacaaaaccactttctgcatttaaccagtcctggctctctctctgctgcctcttcatacgttttctcaagaacttcagtttataattggaagagaaatttttgctgttaatgccagaatgagcaacctcaaggaattgaacacttcttggaaaatctaggtaattcaagccctcatcaggtttacaagatcatcagagaaacagaggattttaatttttagttctggccggctacaggctccatttctctgccttcccattggaaatagtttatttccacattctccactgcgtgtggtcaaagttcctcacccagcaagggactatagatactcgtgtcccaattccaaaacacaatgcacaagctgaacttgggctgaacgtggcgtgttgagatttggaatgaggtttctaagagccgtgttcttcatggaattttccaggccacttggcagcttggtttaccgatggatgggctagagatcttgtcgtttcttggaagtcacagggaagattgaagagaacgcttgagcatccttggcaacagcccaggtgggacctggatgaagctttgcactcaagtattgtcaagggaagcttcctgtgaaccaaagttctcaggccaaggtctcgcccaccaaagccagaaagtgcaagcacccgtctacccagctctaacttgtatgtgtgagacagaccaggcttcgggggtaggaggatctgcagttgttcagccgtctttctgctggtgttgtctttctgccatcagagaagggacacacagcccgttcgaaggtgtgcagagggctctgagcgccaggatggccagggctgtttttgctactgaaggagcgtgtgtcctgaactcccacttgcagggacagtccccaccttctctatagccggcactgggagcagccgccagcagggaaatctggcctgagcacaaggatgctttagggagagatcacttcagtgtgtgtgtatatttatttgcagtacagtgcgcgcgtgtgtgtgtgtgtacgcgcacgtgtgggtgagtgcgtcttctgagtgggttctgttcagttgctaatgaggctcctccgctctggacacaacccttttatagattaatttctctgccaattaacttgtcattttcagtacatattttactattccacaccaaccataattacaacaagggatttttcttatgcactcctatgcatgtgaataacatgtggtgtaattctgcttcttacagaagtattactgaaggtattatttccaatattatttggtttattatgcggatcttttttatatatgcagtcccatcccttctgtgccactcaatgccatccagacatggtttttccctccaggggcctttctctccagagggcacttcggctgcctctgcttcctctcattcgaggcccggctcttgctgacagaataggttccgttctgggcggtggttctcgagcctgccattcaaaaccaaagcaaattggagcatttctcacaacatggtattgaagttcctttttgttctcaaaagttgtgaccgtgttaaattgtactcccttagtcctgtaaggtatgttaagtgaatcgcagttacgctgtacttttattaatatttaacataattaaagatggacccataagagtg

SEQ ID NO: 165 - protein, 175 aa, Homo sapiens
MASLRVERAGGPRLPRTRVGRPAAVRLLLLLGAVLNPHEALAQPLPTTGTPGSEGGTVKNYETAVQFCWNHYKDQMDPIEKDWCDWAMISRPYSTLRDCLEHFAELFDLGFPNPLAERIIFETHQIHFANCSLVQPTFSDPPEDVLLAMIIAPICLIPFLITLVVWRSKDSEAQA

SEQ ID NO: 166 - DNA, 780 bp, Homo sapiens
ggatataggcgcccccacacccgggcccggctaagcgccgccgccgctcctcgcctccttgctgcacgatggcctcgctccgggtggagcgcgccggcggcccgcgtctccctaggacccgagtcgggcggccggcagccgtccgcctcctccttctgctgggcgctgtcctgaatccccacgaggccctggctcagcctcttcccaccacaggcacaccagggtcagaaggggggacggtgaagaactatgagacagctgtccaattttgctggaatcattataaggatcaaatggatcctatcgaaaaggattggtgcgactgggccatgattagcaggccttatagcaccctgcgagattgcctggagcactttgcagagttgtttgacctgggcttccccaatcccttggcagagaggatcatctttgagactcaccagatccactttgccaactgctccctggtgcagcccaccttctctgaccccccagaggatgtactcctggccatgatcatagcccccatctgcctcatccccttcctcatcactcttgtagtatggaggagtaaagacagtgaggcccaggcctagggggcacgagcttctcaacaaccatgttactccacttccccacccccaccaggcctccctcctcccctcctactcccttttctcactctcatccccaccacagatccctggattgctgggaatggaagccagggttgggcatggcacaagttctgtaatcttcaaaataaaactttttttttga

SEQ ID NO: 167 - protein, 493 aa, Homo sapiens
MLAATVLTLALLGNAHACSKGTSHEAGIVCRITKPALLVLNHETAKVIQTAFQRASYPDITGEKAMMLLGQVKYGLHNIQISHLSIASSQVELVEAKSIDVSIQNVSVVFKGTLKYGYTTAWWLGIDQSIDFEIDSAIDLQINTQLTCDSGRVRTDAPDCYLSFHKLLLHLQGEREPGWIKQLFTNFISFTLKLVLKGQICKEINVISNIMADFVQTRAASILSDGDIGVDISLTGDPVITASYLESHHKGHFIYKNVSEDLPLPTFSPTLLGDSRMLYFWFSERVFHSLAKVAFQDGRLMLSLMGDEFKAVLETWGFNTNQEIFQEVVGGFPSQAQVTVHCLKMPKISCQNKGVVVNSSVMVKFLFPRPDQQHSVAYTFEEDIVTTVQASYSKKKLFLSLLDFQITPKTVSNLTESSSESIQSFLQSMITAVGIPEVMSRLEVVFTALMNSKGVSLFDIINPEIITRDGFLLLQMDFGFPEHLLVDFLQSLS

SEQ ID NO: 168 - DNA, 1790 bp, Homo sapiens
gtgaatctctggggccaggaagaccctgctgcccggaagagcctcatgttccgtgggggctgggcggacatacatatacgggctccaggctgaacggctcgggccacttacacaccactgcctgataaccatgctggctgccacagtcctgaccctggccctgctgggcaatgcccatgcctgctccaaaggcacctcgcacgaggcaggcatcgtgtgccgcatcaccaagcctgccctcctggtgttgaaccacgagactgccaaggtgatccagaccgccttccagcgagccagctacccagatatcacgggcgagaaggccatgatgctccttggccaagtcaagtatgggttgcacaacatccagatcagccacttgtccatcgccagcagccaggtggagctggtggaagccaagtccattgatgtctccattcagaacgtgtctgtggtcttcaaggggaccctgaagtatggctacaccactgcctggtggctgggtattgatcagtccattgacttcgagatcgactctgccattgacctccagatcaacacacagctgacctgtgactctggtagagtgcggaccgatgcccctgactgctacctgtctttccataagctgctcctgcatctccaaggggagcgagagcctgggtggatcaagcagctgttcacaaatttcatctccttcaccctgaagctggtcctgaagggacagatctgcaaagagatcaacgtcatctctaacatcatggccgattttgtccagacaagggctgccagcatcctttcagatggagacattggggtggacatttccctgacaggtgatcccgtcatcacagcctcctacctggagtcccatcacaagggtcatttcatctacaagaatgtctcagaggacctccccctccccaccttctcgcccacactgctgggggactcccgcatgctgtacttctggttctctgagcgagtcttccactcgctggccaaggtagctttccaggatggccgcctcatgctcagcctgatgggagacgagttcaaggcagtgctggagacctggggcttcaacaccaaccaggaaatcttccaagaggttgtcggcggcttccccagccaggcccaagtcaccgtccactgcctcaagatgcccaagatctcctgccaaaacaagggagtcgtggtcaattcttcagtgatggtgaaattcctctttccacgcccagaccagcaacattctgtagcttacacatttgaagaggatatcgtgactaccgtccaggcctcctattctaagaaaaagctcttcttaagcctcttggatttccagattacaccaaagactgtttccaacttgactgagagcagctccgagtccatccagagcttcctgcagtcaatgatcaccgctgtgggcatccctgaggtcatgtctcggctcgaggtagtgtttacagccctcatgaacagcaaaggcgtgagcctcttcgacatcatcaaccctgagattatcactcgagatggcttcctgctgctgcagatggactttggcttccctgagcacctgctggtggatttcctccagagcttgagctagaagtctccaaggaggtcgggatggggcttgtagcagaaggcaagcaccaggctcacagctggaaccctggtgtctcctccagcgtggtggaagttgggttaggagtacggagatggagattggctcccaactcctccctatcctaaaggcccactggcattaaagtgctgtatccaag

SEQ ID NO: 169 - protein, 167 aa, Homo sapiens
MLVLLAFIIAFHITSAALLFIATVDNAWWVGDEFFADVWRICTNNTNCTVINDSFQEYSTLQAVQATMILSTILCCIAFFIFVLQLFRLKQGERFVLTSIIQLMSCLCVMIAASIYTDRREDIHDKNAKFYPVTREGSYGYSYILAWVAFACTFISGMMYLILRKRK

SEQ ID NO: 170 - DNA, 799 bp, Homo sapiens
tcgcctcgcacccccagccagtccgtcgatccagctgccagcgcagccgccagcgccggcacatcccgctctgggctttaaacgtgacccctcgcctcgactcgccctgccctgtgaaaatgttggtgcttcttgctttcatcatcgccttccacatcacctctgcagccttgctgttcattgccaccgtcgacaatgcctggtgggtaggagatgagttttttgcagatgtctggagaatatgtaccaacaacacgaattgcacagtcatcaatgacagctttcaagagtactccacgctgcaggcggtccaggccaccatgatcctctccaccattctctgctgcatcgccttcttcatcttcgtgctccagctcttccgcctgaagcagggagagaggtttgtcctaacctccatcatccagctaatgtcatgtctgtgtgtcatgattgcggcctccatttatacagacaggcgtgaagacattcacgacaaaaacgcgaaattctatcccgtgaccagagaaggcagctacggctactcctacatcctggcgtgggtggccttcgcctgcaccttcatcagcggcatgatgtacctgatactgaggaagcgcaaatagagttccggagctgggttgcttctgctgcagtacagaatccacattcagataaccattttgtatataatcattattttttgaggtttttctagcaaacgtattgtttcctttaaaagccaaaaaaaaaaaaaaaaaaaaaaaaaaaaaaaaaaaagaaaaaaaaaaaaaaaaaaaaa

SEQ ID NO: 171 - protein, 258 aa, Homo sapiens
MMVLQVSAAPRTVALTALLMVLLTSVVQGRATPENYLFQGRQECYAFNGTQRFLERYIYNREEFARFDSDVGEFRAVTELGRPAAEYWNSQKDILEEKRAVPDRMCRHNYELGGPMTLQRRVQPRVNVSPSKKGPLQHHNLLVCHVTDFYPGSIQVRWFLNGQEETAGVVSTNLIRNGDWTFQILVMLEMTPQQGDVYTCQVEHTSLDSPVTVEWKAQSDSARSKTLTGAGGFVLGLIICGVGIFMHRRSKKVQRGSA

SEQ ID NO: 172 - DNA, 1501 bp, Homo sapiens
agcgagtccttcttttcctgactgcagctcttttcattttgccatccttttccagctccatgatggttctgcaggtttctgcggccccccggacagtggctctgacggcgttactgatggtgctgctcacatctgtggtccagggcagggccactccagagaattaccttttccagggacggcaggaatgctacgcgtttaatgggacacagcgcttcctggagagatacatctacaaccgggaggagttcgcgcgcttcgacagcgacgtgggggagttccgggcggtgacggagctggggcggcctgctgcggagtactggaacagccagaaggacatcctggaggagaagcgggcagtgccggacaggatgtgcagacacaactacgagctgggcgggcccatgaccctgcagcgccgagtccagcctagggtgaatgtttccccctccaagaaggggcccttgcagcaccacaacctgcttgtctgccacgtgacggatttctacccaggcagcattcaagtccgatggttcctgaatggacaggaggaaacagctggggtcgtgtccaccaacctgatccgtaatggagactggaccttccagatcctggtgatgctggaaatgaccccccagcagggagatgtctacacctgccaagtggagcacaccagcctggatagtcctgtcaccgtggagtggaaggcacagtctgattctgcccggagtaagacattgacgggagctgggggcttcgtgctggggctcatcatctgtggagtgggcatcttcatgcacaggaggagcaagaaagttcaacgaggatctgcataaacagggttcctgagctcactgaaaagactattgtgccttaggaaaagcatttgctgtgtttcgttagcatctggctccaggacagaccttcaacttccaaattggatactgctgccaagaagttgctctgaagtcagtttctatcattctgctctttgattcaaagcactgtttctctcactgggcctccaaccatgttcccttcttcttagcaccacaaataatcaaaacccaacatgactgtttgttttcctttaaaaatatgcaccaaatcatctctcatcacttttctctgagggttttagtagacagtaggagttaataaagaagttcattttggtttaaacataggaaagaagagaaccatgaaaatggggatatgttaactattgtataatggggcctgttacacatgacactcttctgaattgactgtatttcagtgagctgcccccaaatcaagtttagtgccctcatccatttatgtctcagaccactattcttaactattcaatggtgagcagactgcaaatctgcctgataggacccatattcccacagcactaattcaacatataccttactgagagcatgttttatcattaccattaagaagttaaatgaacatcagaatttaaaatcataaatataatctaatacacttt

SEQ ID NO: 173 - protein, 409 aa, Homo sapiens
MGEKPGTRVFKKSSPNCKLTVYLGKRDFVDHLDKVDPVDGVVLVDPDYLKDRKVFVTLTCAFRYGREDLDVLGLSFRKDLFIATYQAFPPVPNPPRPPTRLQDRLLRKLGQHAHPFFFTIPQNLPCSVTLQPGPEDTGKACGVDFEIRAFCAKSLEEKSHKRNSVRLVIRKVQFAPEKPGPQPSAETTRHFLMSDRSLHLEASLDKELYYHGEPLNVNVHVTNNSTKTVKKIKVSVRQYADICLFSTAQYKCPVAQLEQDDQVSPSSTFCKVYTITPLLSDNREKRGLALDGKLKHEDTNLASSTIVKEGANKEVLGILVSYRVKVKLVVSRGGDVSVELPFVLMHPKPHDHIPLPRPQSAAPETDVPVDTNLIEFDTNYATDDDIVFEDFARLRLKGMKDDDYDDQLC

SEQ ID NO: 174 - DNA, 1941 bp, Homo sapiens
aatgtccccgcgtgtctgctaggagagggcgggcagcgccgcggcgcgcgcgatccggctgacgcatctggccccggttccccaagaccagagcggggccgggagggagggggaagaggcgagagcgcggagggcgcgcgtgcgcattggcgcggggaggagcagggatcttggcagcgggcgaggaggctgcgagcgagccgcgaaccgagcgggcggcgggcgcgcgcaccatgggggagaaacccgggaccagggtcttcaagaagtcgagccctaactgcaagctcaccgtgtacttgggcaagcgggacttcgtagatcacctggacaaagtggaccctgtagatggcgtggtgcttgtggaccctgactacctgaaggaccgcaaagtgtttgtgaccctcacctgcgccttccgctatggccgtgaagacctggatgtgctgggcttgtccttccgcaaagacctgttcatcgccacctaccaggccttccccccggtgcccaacccaccccggccccccacccgcctgcaggaccggctgctgaggaagctgggccagcatgcccaccccttcttcttcaccataccccagaatcttccatgctccgtcacactgcagccaggcccagaggatacaggaaaggcctgcggcgtagactttgagattcgagccttctgtgctaaatcactagaagagaaaagccacaaaaggaactctgtgcggctggtgatccgaaaggtgcagttcgccccggagaaacccggcccccagccttcagccgaaaccacacgccacttcctcatgtctgaccggtccctgcacctcgaggcttccctggacaaggagctgtactaccatggggagcccctcaatgtaaatgtccacgtcaccaacaactccaccaagaccgtcaagaagatcaaagtctctgtgagacagtacgccgacatctgcctcttcagcaccgcccagtacaagtgtcctgtggctcaactcgaacaagatgaccaggtatctcccagctccacattctgtaaggtgtacaccataaccccactgctcagtgacaaccgggagaagcggggtctcgccctggatgggaaactcaagcacgaggacaccaacctggcttccagcaccatcgtgaaggagggtgccaacaaggaggtgctgggaatcctggtgtcctacagggtcaaggtgaagctggtggtgtctcgaggcggggatgtctctgtggagctgccttttgttcttatgcaccccaagccccacgaccacatccccctccccagaccccagtcagccgctccggagacagatgtccctgtggacaccaacctcattgaatttgataccaactatgccacagatgatgacattgtgtttgaggactttgcccggcttcggctgaaggggatgaaggatgacgactatgatgatcaactctgctaggaagcggggtgggaagaagggaggggatggggttgggagaggtgagggcaggattaagatccccactgtcaatgggggattgtcccagcccctcttcccttcccctcacctggaagcttcttcaaccaatcccttcacactctctcccccatccccccaagatacacactggaccctctcttgctgaatgtgggcattaattttttgactgcagttctgcttctccagccccgccgtgggtggcaagctgtgttcatacctaaattttctggaaggggacagtgaaaagaggagtgacaggagggaaagggggagacaaaactcctactctcaacctcacaccaacacctcccattatcactctctctgcccccattccttcaagaggagaccctttggggacaaggccgtttctttgtttctgagcataaagaagaaaataaatcttttactaagcatgaaaaaaaaaaaaaaaaaa

SEQ ID NO: 175 - protein, 1085 aa, Homo sapiens
MDTPENVLQMLEAHMQSYKGNDPLGEWERYIQWVEENFPENKEYLITLLEHLMKEFLDKKKYHNDPRFISYCLKFAEYNSDLHQFFEFLYNHGIGTLSSPLYIAWAGHLEAQGELQHASAVLQRGIQNQAEPREFLQQQYRLFQTRLTETHLPAQARTSEPLHNVQVLNQMITSKSNPGNNMACISKNQGSELSGVISSACDKESNMERRVITISKSEYSVHSSLASKVDVEQVVMYCKEKLIRGESEFSFEELRAQKYNQRRKHEQWVNEDRHYMKRKEANAFEEQLLKQKMDELHKKLHQVVETSHEDLPASQERSEVNPARMGPSVGSQQELRAPCLPVTYQQTPVNMEKNPREAPPVVPPLANAISAALVSPATSQSIAPPVPLKAQTVTDSMFAVASKDAGCVNKSTHEFKPQSGAEIKEGCETHKVANTSSFHTTPNTSLGMVQATPSKVQPSPTVHTKEALGFIMNMFQAPTLPDISDDKDEWQSLDQNEDAFEAQFQKNVRSSGAWGVNKIISSLSSAFHVFEDGNKENYGLPQPKNKPTGARTFGERSVSRLPSKPKEEVPHAEEFLDDSTVWGIRCNKTLAPSPKSPGDFTSAAQLASTPFHKLPVESVHILEDKENVVAKQCTQATLDSCEENMVVPSRDGKFSPIQEKSPKQALSSHMYSASLLRLSQPAAGGVLTCEAELGVEACRLTDTDAAIAEDPPDAIAGLQAEWMQMSSLGTVDAPNFIVGNPWDDKLIFKLLSGLSKPVSSYPNTFEWQCKLPAIKPKTEFQLGSKLVYVHHLLGEGAFAQVYEATQGDLNDAKNKQKFVLKVQKPANPWEFYIGTQLMERLKPSMQHMFMKFYSAHLFQNGSVLVGELYSYGTLLNAINLYKNTPEKVMPQGLVISFAMRMLYMIEQVHDCEIIHGDIKPDNFILGNGFLEQDDEDDLSAGLALIDLGQSIDMKLFPKGTIFTAKCETSGFQCVEMLSNKPWNYQIDYFGVAATVYCMLFGTYMKVKNEGGECKPEGLFRRLPHLDMWNEFFHVMLNIPDCHHLPSLDLLRQKLKKVFQQHYTNKIRALRNRLIVLLLECKRSRK

SEQ ID NO: 176 - DNA, 3446 bp, Homo sapiens
ttctagtttgcggttcaggtttgccgctgccggccagcgtcctctggccatggacaccccggaaaatgtccttcagatgcttgaagcccacatgcagagctacaagggcaatgaccctcttggtgaatgggaaagatacatacagtgggtagaagagaattttcctgagaataaagaatacttgataactttactagaacatttaatgaaggaatttttagataagaagaaataccacaatgacccaagattcatcagttattgtttaaaatttgctgagtacaacagtgacctccatcaattttttgagtttctgtacaaccatgggattggaaccctgtcatcccctctgtacattgcctgggcggggcatctggaagcccaaggagagctgcagcatgccagtgctgtccttcagagaggaattcaaaaccaggctgaacccagagagttcctgcaacaacaatacaggttatttcagacacgcctcactgaaacccatttgccagctcaagctagaacctcagaacctctgcataatgttcaggttttaaatcaaatgataacatcaaaatcaaatccaggaaataacatggcctgcatttctaagaatcagggttcagagctttctggagtgatatcttcagcttgtgataaagagtcaaatatggaacgaagagtgatcacgatttctaaatcagaatattctgtgcactcatctttggcatccaaagttgatgttgagcaggttgttatgtattgcaaggagaagcttattcgtggggaatcagaattttcctttgaagaattgagagcccagaaatacaatcaacggagaaagcatgagcaatgggtaaatgaagacagacattatatgaaaaggaaagaagcaaatgcttttgaagaacagctattaaaacagaaaatggatgaacttcataagaagttgcatcaggtggtggagacatcccatgaggatctgcccgcttcccaggaaaggtccgaggttaatccagcacgtatggggccaagtgtaggctcccagcaggaactgagagcgccatgtcttccagtaacctatcagcagacaccagtgaacatggaaaagaacccaagagaggcacctcctgttgttcctcctttggcaaatgctatttctgcagctttggtgtccccagccaccagccagagcattgctcctcctgttcctttgaaagcccagacagtaacagactccatgtttgcagtggccagcaaagatgctggatgtgtgaataagagtactcatgaattcaagccacagagtggagcagagatcaaagaagggtgtgaaacacataaggttgccaacacaagttcttttcacacaactccaaacacatcactgggaatggttcaggcaacgccatccaaagtgcagccatcacccaccgtgcacacaaaagaagcattaggtttcatcatgaatatgtttcaggctcctacacttcctgatatttctgatgacaaagatgaatggcaatctctagatcaaaatgaagatgcatttgaagcccagtttcaaaaaaatgtaaggtcatctggggcttggggagtcaataagatcatctcttctttgtcatctgcttttcatgtgtttgaagatggaaacaaagaaaattatggattaccacagcctaaaaataaacccacaggagccaggacctttggagaacgctctgtcagcagacttccttcaaaaccaaaggaggaagtgcctcatgctgaagagtttttggatgactcaactgtatggggtattcgctgcaacaaaaccctggcacccagtcctaagagcccaggagacttcacatctgctgcacaacttgcgtctacaccattccacaagcttccagtggagtcagtgcacattttagaagataaagaaaatgtggtagcaaaacagtgtacccaggcgactttggattcttgtgaggaaaacatggtggtgccttcaagggatggaaaattcagtccaattcaagagaaaagcccaaaacaggccttgtcgtctcacatgtattcagcatccttacttcgtctgagccagcctgctgcaggtggggtacttacctgtgaggcagagttgggcgttgaggcttgcagactcacagacactgacgctgccattgcagaagatccaccagatgctattgctgggctccaagcagaatggatgcagatgagttcacttgggactgttgatgctccaaacttcattgttgggaacccatgggatgataagctgattttcaaacttttatctgggctttctaaaccagtgagttcctatccaaatacttttgaatggcaatgtaaacttccagccatcaagcccaagactgaatttcaattgggttctaagctggtctatgtccatcaccttcttggagaaggagcctttgcccaggtgtacgaagctacccagggagatctgaatgatgctaaaaataaacagaaatttgttttaaaggtccaaaagcctgccaacccctgggaattctacattgggacccagttgatggaaagactaaagccatctatgcagcacatgtttatgaagttctattctgcccacttattccagaatggcagtgtattagtaggagagctctacagctatggaacattattaaatgccattaacctctataaaaatacccctgaaaaagtgatgcctcaaggtcttgtcatctcttttgctatgagaatgctttacatgattgagcaagtgcatgactgtgaaatcattcatggagacattaaaccagacaatttcatacttggaaacggatttttggaacaggatgatgaagatgatttatctgctggcttggcactgattgacctgggtcagagtatagatatgaaactttttccaaaaggaactatattcacagcaaagtgtgaaacatctggttttcagtgtgttgagatgctcagcaacaaaccatggaactaccagatcgattactttggggttgctgcaacagtatattgcatgctctttggcacttacatgaaagtgaaaaatgaaggaggagagtgtaagcctgaaggtctttttagaaggcttcctcatttggatatgtggaatgaattttttcatgttatgttgaatattccagattgtcatcatcttccatctttggatttgttaaggcaaaagctgaagaaagtatttcaacaacactatactaacaagattagggccctacgtaataggctaattgtactgctcttagaatgtaagcgttcacgaaaataaaatttggatatagacagtccttaaaaatcacactgtaaatatgaatctgctcactttaaacctgtttttttttcatttattgtttatgtaaatgtttgttaaaaataaatcccatggaatatttccatgtaaaaaaaaa

SEQ ID NO: 177 - protein, 1180 aa, Homo sapiens
SWGKGREGVVSPAGLGGALPGDGKFGSPSRLGCSLGEGVQRVAALGMGKEQELLEAARTGHLPAVEKLLSGKRLSSGFGGGGGGGSGGGGGGSGGGGGGLGSSSHPLSSLLSMWRGPNVNCVDSTGYTPLHHAALNGHKDVVEVLLRNDALTNVADSKGCYPLHLAAWKGDAQIVRLLIHQGPSHTRVNEQNNDNETALHCAAQYGHTEVVKVLLEELTDPTMRNNKFETPLDLAALYGRLEVVKMLLNAHPNLLSCNTKKHTPLHLAARNGHKAVVQVLLDAGMDSNYQTEMGSALHEAALFGKTDVVQILLAAGTDVNIKDNHGLTALDTVRELPSQKSQQIAALIEDHMTGKRSTKEVDKTPPPQPPLISSMDSISQKSQGDVEKAVTELIIDFDANAEEEGPYEALYNAISCHSLDSMASGRSSDQDSTNKEAEAAGVKPAGVRPRERPPPPAKPPPDEEEEDHIDKKYFPLTASEVLSMRPRIHGSAAREEDEHPYELLLTAETKKVVLVDGKTKDHRRSSSSRSQDSAEGQDGQVPEQFSGLLHGSSPVCEVGQDPFQLLCTAGQSHPDGSPQQGACHKASMQLEETGVHAPGASQPSALDQSKRVGYLTGLPTTNSRSHPETLTHTASPHPGGAEEGDRSGARSRAPPTSKPKAELKLSRSLSKSDSDLLTCSPTEDATMGSRSESLSNCSIGKKRLEKSPSFASEWDEIEKIMSSIGEGIDFSQERQKISGSRTLEQSVGEWLESIGLQQYESKLLLNGFDDVHFLGSNVMEEQDLRDIGISDPQHRRKLLQAARSLPKVKALGYDGNSPPSVPSWLDSLGLQDYVHSFLSSGYSSIDTVKNLWELELVNVLKVQLLGHRKRIIASLADRPYEEPPQKPPRFSQLRCQDLLSQTSSPLSQNDSCTGRSADLLLPPGDTGRRRHDSLHDPAAPSRAERFRIQEEHREAKLTLRPPSLAAPYAPVQSWQHQPEKLIFESCGYEANYLGSMLIKDLRGTESTQDACAKMRKSTEHMKKIPTIILSITYKGVKFIDASNKNVIAEHEIRNISCAAQDPEDLCTFAYITKDLQTSHHYCHVFSTVDVNLTYEIILTLGQAFEVAYQLALQAQKSRATGASAAEMIETKSSKPVPKPRVGVRKSALEPPDMDQDAQSHASVSWVVDPKPDSKRSLSTN

SEQ ID NO: 178 - DNA, 6335 bp, Homo sapiens
ctcgtggggaaaaggcagggagggggtggtgtccccagccggtttggggggtgcgttgcccggagacggaaagtttgggagcccgagcaggctcggctgcagcctcggggagggggtccagcgggtggcggccctggggatggggaaggagcaggagctgctggaggcggcccgcaccgggcacctcccggcggtggagaagctgctgtccgggaagcggctctcctcaggctttgggggcggcggcggcggtggctctgggggcggcggcggcggcagcggcggcggcggcggcggcctcggctcttccagccaccccctctccagtctgctcagcatgtggagagggccaaatgtgaactgtgttgacagcactggctacacacccctgcaccatgctgctttgaatggccataaggatgtggtcgaggttcttctgaggaacgatgcgctgaccaacgtggctgactcaaaaggctgctaccctctgcatttggcagcctggaaaggagatgcccagatagtgcggttgctcatccatcaagggccttcacacaccagagtcaatgaacagaacaatgacaacgagacagccctgcattgtgcagcgcagtatggccacacagaggtggtgaaggtgctcttagaggagctgacggaccccaccatgcgcaacaacaaattcgagacccctttggacctggcagcactgtacgggcgactggaggtggtgaaaatgctccttaatgcacaccccaacctcctgagctgcaacactaagaagcacacccctctgcacttggcagcaaggaatggccacaaagccgtggtccaggtcctcctcgatgctggcatggacagcaactaccagacggagatgggcagtgctttgcatgaggctgctttgtttggcaagaccgatgtggtgcaaatcctgctggctgcaggaactgacgtcaacataaaagataaccatggactgactgccctagacactgttcgggaactgccttctcaaaagagccagcaaatagcagcattaattgaagatcacatgactggaaaaagaagtacaaaagaagtagataaaacccccccaccccagccacctctcatctccagtatggactccatatcacagaagtctcagggtgacgtggagaaagcagtgactgaactgattatagattttgatgcaaatgctgaagaagagggtccctacgaagctctgtataatgccatctcctgccattcgttggacagcatggccagcgggcgatcatctgaccaagactccacgaacaaggaggctgaggcagcaggagtgaaacctgctggagtgaggcctagggaacgtccaccacctccagcaaagccaccgcccgatgaagaggaagaagaccacatagataagaagtattttcccttgacagcttctgaggttctgtccatgagacctaggattcatgggagtgcagcccgggaagaagacgaacacccttatgaactgttgttaacagcagagacaaagaaagtggtgttggtggatggaaaaacaaaagaccacaggcggagcagcagcagccggagccaggactctgcggaggggcaggacgggcaggtcccagagcagttctcaggcctcctccacggctcctccccggtgtgcgaggtggggcaggaccctttccagctgctctgtaccgctggccagagccatccagacgggtccccccagcagggcgcctgccacaaggccagcatgcagctggaggagacgggtgtgcatgctcctggagcctcccagcccagtgccctggaccagagcaagagagtgggctacctcacaggcctgcccaccaccaacagccgctcgcaccctgaaactttgactcacacagcatctccgcaccctggtggtgctgaggaaggagaccggagtggggccaggagccgagcgcctcccactagcaaacccaaagctgaactcaaactcagccgcagcttgtccaagtctgactctgatctcctgacctgctcacccacagaggacgctaccatggggagtcggagtgagtccttatccaactgcagcattgggaagaaaaggctagagaagtcaccctccttcgcctcggagtgggatgagattgagaaaatcatgagttctattggagaagggattgacttttctcaggaacggcagaagatctcaggttcacggacgctggagcagagtgtcggggagtggctggagtcgattgggctgcagcagtatgagagcaagttgcttctgaatggctttgacgatgtccacttcctggggtctaatgtgatggaagagcaggacctgcgggacatcggcatcagcgacccacagcaccggcggaagctgctccaggcggcacgctccctacccaaggtgaaggctctgggttatgacgggaacagcccccctagcgtgccctcctggctggactccctggggctgcaggactacgtccattccttcttgtcaagtggttacagctccattgacaccgtgaagaacctctgggagctagagctcgtcaatgtcctgaaggtccagctgctcggccatcgcaagcgcatcatcgcctccctcgcagacagaccgtacgaggagccgccccagaagccccccagattctcccagctgaggtgccaagatttgctctcccagacgtcatccccactgagtcagaatgattcctgcactgggcggtcggcagatctgctgctgcctccaggggacacaggcaggaggcgccatgacagtctccatgaccctgcggcaccctcccgagcggagcgcttcaggatccaggaggagcaccgtgaggccaagctgaccctgcggcccccaagcctggcagccccctacgccccagtgcagagttggcaacaccagccagagaaactcatcttcgagtcctgtggttatgaagccaattatctgggctccatgctgatcaaagatctgcgagggacagaatccacgcaagacgcctgtgccaagatgcggaaatctacggagcacatgaagaagatccccaccatcatcctgtccatcacatacaaaggtgtcaagttcatcgatgcctccaacaagaacgtcattgcagagcacgagatccggaacatttcctgtgcggcccaggacccggaggacctctgtacctttgcctacatcaccaaggacctgcagaccagccaccactattgccatgtgttcagcaccgtggatgtgaacctgacctacgagatcatcctgacgctggggcaggccttcgaagtggcctatcagttggccctgcaggcccagaagtccagggcgacgggcgcctctgcagctgagatgattgaaacaaaatcttccaaaccggtgcctaagcctcgggtcggcgtgaggaaatccgcactggaaccacctgatatggaccaagatgcccaatcccatgccagtgtctcctgggttgtggaccccaaaccagactctaagcggagcctcagcaccaactgagccactgaggaaccacactgtgctgcggaaacatagacgtgggggcataggctcccgctgccaccaccgccatcgcctcacctgcagctctgaagacccaggcctcacctccgcctgcaggacctcctcttggccacttggcctgggcctgccaccaccacgtcctgcagaacgagccctgccttggctgtggagaagcactccaggccgctagcagatgggactggcattccagagggtcaagaagtgacttgttcagaacacattgtttttaacagaaaaaaaatctttttataaaatgaacttttaacacttggctcaaacctctaggtcatactgccaatctttagacaaatggccatggggcagaggacaggggagctgaggttggttcagaggccagcctgcatagcctctgtcctcaggacggaacttgggtgcagctcagtgggtcggaagagaaggcggtggcctgtgggtgaggggaacggagcaggctcaggcagaattgagtacggtgcgtctgcttttcaaacccaaccatatcagctgctgctctttatgaactgcccaacttcctgtccctttcaggggctagacacaggcttctcgtaagaacacagccttagaggcacctgagcaactcaaaggtttccggtccatttctggggttcccgatgggaaggttcagtggccaaatgaagataagtgtgcagtttctagtgctgggaagtcttagccagcaccagagcgccaggcctctccctggcctcttacctgtcagtgatcggagcactgccctgggctggccggcgccgtactgcctgcgttgtgtcagagaataggaaaagcagctttgtttggggcattaatgcttggagtggggtcagctaaggttgctacttgccaatttgtgatttgtctaatcagcctgtgtgattggggctcattttgattctctgaattatcggtttgacggttacacttggctgctgggcccatccctggcccccggtgtggaaaaggctaaataaggtgacagtgcatcgatgctcccccgcgtggcctttggggcaggctggcatcccggtgcgcctctgcttcttaagctttcctgctgctcgctttgtttttaaaagtaacttgggttgcattcttccctctggactagagtagaaatgcaggggaaactgctgtggatttgagaggcaaagttggctcagctgtgtgcccagttcctcctgtgggcactttagcaggctccgagctttcctggcataggtcaatcaggtcccaggatgaataatccaggcttcagcaacactcctctttcccagccagcaaaggctgtgaatttgaattctttgttggtatgtatgtgcagggagtactgttaggcacattcttaacccatgtggttggccagaaatcagaagtggggctgtgtctctgactggctagaggccaggccttgtgggtttctatctgctaagcacccagcaggttggggcctgggactcagctctctctgcggtagaggcaggccctcctccacttcttggtactaaacgaagatctcgacaccttgcagttttacttcatttcctgcccctttcagggcctgtgaggatgcccatgagctaccgctgtacagttctcggccccggctttcttccaagagttgaccaggaaccctaaagcatccagagtagactgcgctgccactgcgcacatgctggtgcccgtcttcctcctaaggggccaggccacatccaagtgggcctctgtcgggggcggggcggtaggtccgaaagaaaccgcagacactacgatgcactcctcaagctgtcttttgtgcttagatcatccataggtgtttcttctgcttgaagctgctatatcatctttatttattcagggtattttcatattggaagccttggctagtctgctctagctctgggttctgtttagagattggtttatttctgaatattcaagaaaggaaaatgactgggcctttctttcttttcttctcctctgggatgggtagtctccctttcctagaaaggttattataactttaaggacaggcttcaagtgggaaggcccctacttttgcacttctccaagtgcaggtcacaccaggggcagaccctgtcgctgcgtttctgaactgtgaaggagcccattcgggtgggagacttcagatgggctcagtacctgtcccagccacaggcttcttgtccacctcttctcccctgcccaccagctgctcagcgcataagaccttcccgacaggctctgcgtgtgcagctctctgcgtccctcctgggccctccagcgtcagacactaatgggagttcccgagatgctcgggtttgagcagggagcaggcagagctgcagtcagagacattagaaaaccagtctgaattgggtctgtctttgagatgcccaggccagcagaaagcagctcagaagtattgttgctcatggtgtggcaatggactgaactgtaatgaaaatgttatttaatctttgtctctgtattttgatacttgaatgactttcccttttgttttactgtatataaaattgttaatctgtctgattttgtctgaattataaacactttgaggtaccaaacataaccaatctgtgcaacaacatagactgacctcagtacccaagagagtgtaaatatttctgggcttccagctttggttttgttattttcataactgtacacaacttagaacagactgaattaataaatgagaagcgacatg

SEQ ID NO: 179 - protein, 139 aa, Homo sapiens
CEQCGKCKCGECTAPRTLPSCLACNRQCLCSAESMVEYGTCMCLVKGIFYHCSNDDEGDSYSDNPCSCSQSHCCSRYLCMGAMSLFLPCLLCYPPAKGCLKLCRRCYDWIHRPGCRCKNSNTVYCKLESCPSRGQGKPS

SEQ ID NO: 180 - DNA, 1604 bp, Homo sapiens
tgtgaacagtgtgggaagtgcaagtgtggagaatgcactgctcccaggaccctaccatcctgtttggcctgtaaccggcagtgcctttgctctgctgagagcatggtggaatatggaacctgcatgtgcttagtcaagggcatcttctaccactgctccaatgacgacgaaggggattcctattcagataatccttgctcctgttcacaatcacactgctgctctagatacctgtgtatgggagccatgtctttatttttaccttgcttactctgttatcctcctgctaaaggatgcctgaagctgtgcaggaggtgttatgactggatccatcgcccagggtgcagatgtaagaactccaacactgtctattgtaagctggagagctgcccctcccggggtcagggtaaaccatcatgatttttggaggtgggttgtacctcctgaacttttagctttcaagttgtggctgttttttgttttgttttgtttgttttctttaaattttccgttccctccttcccctgttgccaaggtctaactcatggatttttctctttcctcatggatgatcttcagcaagagtggactgggaagctgcacctggctcccactttcaacaagagcctctgccatccacttgagggtattgagagccagtgggcttttgtgtacctttttgttctgcaagcaactttctaaagttgtgtacatgaacatacacccacatccagaacagtgatttagagttgttttgattgggtaccgtgggagcagggaaattggttttttaaaaagcaactgtttaattgcttaaataagctatgtattaaatctgtctccagttagggctatcttcctagcataggccccttaagtagcatgggggaattttgtataacgtaaaaatttcctttaaccactgccctctccttcttttccttcaaggtttttccccctcagtttgttgttgtcttattggagatgccaagtgattttttcttttatgtaattttagattgcctacaatgtaaatttcacattggagataatattggttggacctcgcccatcttcacttagccttcgtatttgtgaaggattcagccaccttccttcttcaccccatgcttctcaccaaaattttgttgtcattgagggcacttggataactcaagttgatatttatagctgatcaatctatatgtgtcacagaactatgctgcctaaagtgatcttggctccttaatggtccttttggccccttggatagttaacagctgagtaattctaatctcttctgtgttttccttgccttaaccacaaattgtggtgctttttgtatattttatgtataaatcacaaagttgaattctgactatttttaagacaaaagtctgttaaacttttttattgtaaagaatatttattatgcgaatctctattattttatggtatttattgcaaaagactgttgaaatgtactcatgtttgaatataacaaaatatcaatacttaacggaaaataaggtgacacgaagaaagtacatatgttaactataatgcagaaaatatattaattaatgaaaaaaaaaaaaaaaaaa

SEQ ID NO: 181 - protein, 580 aa, Homo sapiens
MGSSRLRVFDPHLERKDSAAALSDRELPLPTFDVPYFKYIDEEDEDDEWSSRSQSSTEDDSVDSLLSDRYVVVSGTPEKILEHLLNDLHLEEVQDKETETLLDDFLLTYTVFMTTDDLCQALLRHYSAKKYQGKEENSDVPRRKRKVLHLVSQWIALYKDWLPEDEHSKMFLKTIYRNVLDDVYEYPILEKELKEFQKILGMHRRHTVDEYSPQKKNKALFHQFSLKENWLQHRGTVTETEEIFCHVYITEHSYVSVKAKVSSIAQEILKVVAEKIQYAEEDLALVAITFSGEKHELQPNDLVISKSLEASGRIYVYRKDLADTLNPFAENEESQQRSMRILGMNTWDLALELMNFDWSLFNSIHEQELIYFTFSRQGSGEHTANLSLLLQRCNEVQLWVATEILLCSQLGKRVQLVKKFIKIAAHCKAQRNLNSFFAIVMGLNTASVSRLSQTWEKIPGKFKKLFSELESLTDPSLNHKAYRDAFKKMKPPKIPFMPLLLKDVTFIHEGNKTFLDNLVNFEKLHMIADTVRTLRHCRTNQFGDLSPKEHQELKSYVNHLYVIDSQQALFELSHRIEPRV

SEQ ID NO: 182 - DNA, 5900 bp, Homo sapiens
gggatggcaagatcttttagcatttaggggatgcctttgttagtaaccgttcacaatgggcagctcccggctgagggtctttgaccctcatttggagaggaaagattccgccgcggcgctctcagaccgagagctgcccttgcctaccttcgatgtgccttatttcaaatacatcgacgaggaggatgaggacgatgaatggagcagccgttcgcagtcttccaccgaggatgactcagtggactctctgctctctgacagatatgtggtggtgtccgggaccccggagaagattttggagcaccttttgaatgacttgcacctggaagaagtccaggacaaagaaacagagaccctcctggatgacttccttctcacgtacactgtcttcatgacaactgatgacttgtgccaggctctgttaaggcactattctgctaagaagtatcaaggcaaagaggaaaactcagatgttccgcgtaggaaacgtaaagtcttgcatcttgtttcccagtggattgctctgtacaaagactggttacctgaagatgaacattcaaaaatgtttttaaagaccatatataggaatgtactggatgatgtttatgaatatccaatacttgaaaaagaattgaaagaatttcaaaagatacttggaatgcaccgtcgtcacactgtagatgaatattcaccacaaaaaaagaataaagcccttttccaccaattcagtcttaaggagaactggctccagcatagaggaactgtgactgaaacggaggaaattttctgccacgtgtatataacagagcactcctatgtcagtgtgaaggcaaaagtttccagtatagcccaagagatcctaaaagtcgtggcagaaaagatccagtatgcagaagaggatctggctctggtggccatcacattctctggggaaaagcatgaacttcagccaaatgacttagtcatctccaaatccctcgaggcatctggtcgaatatatgtctaccggaaagacctggcggacactttgaacccatttgcagaaaatgaggaatcacagcaaaggtcgatgaggattttgggaatgaacacttgggatcttgctctggaattaatgaattttgattggagtctattcaattcaattcacgagcaagagctgatctacttcacgttcagcagacagggaagtggggaacacactgcaaatctcagccttctgctccagagatgcaatgaggtccagctttgggtggccacggagattctgctctgcagccagctgggcaagcgagtgcagctggtgaaaaaattcatcaaaattgcggctcactgcaaagcccagagaaacctgaattctttctttgccattgtgatgggtctcaacactgcttctgtcagtcgactgtcgcagacctgggagaaaatccctgggaagtttaagaaacttttctctgaacttgaaagtttaacagatccttccctaaatcacaaagcctacagagatgcattcaaaaagatgaagccaccaaaaatccctttcatgcccttattgcttaaagatgtaacatttattcatgaaggaaataaaacttttttggataatcttgtcaattttgaaaagctgcatatgatcgcagacactgtccgaaccctgagacactgcaggactaaccagtttggtgacctgtctccaaaagagcatcaagagttaaagtcctatgttaatcacctgtatgtcattgacagccagcaggctctgtttgagctctcacacaggatcgagcctcgggtgtgagccccactgcctcacctcccctgtatctgcagcactttgagctacgggaatgtctatgccaagcacgttgctttcctgtgagaaaagaagttgctgagttttatcagtataacccaagacattcacaggaaagccagccaaagcgtgttcaggaagtgatgtcagccaccagagagggggagaggtttctccatgctactctcgggacaagaaggcagaaggagagtcagaagcattcttgagatggagaaggctggtttcttatgatcacattgttgatccagtccagttttcaatatgagatgtgccagcatcaagacaagacaacgtcttgacatgcaatgaccaaatatttcattaagagcgtgcatgaaacaggaaggagtttttactttgcctagttttagattactgtccataagctgtcaaagaagtcattcttttgaacacctgatgacagagacagcatctctagatctccagggaggagaggtttctgttgatacaacctgtgacatcaccaaaagccacttgtgtctagggagttagtgaggactgcagctagcatccatgctctgatgggcagatgaacaatgtcaaggtgtgcatcactttgcaccacaatcaactattgacacatgcttgcaggtgaaattagtttctgtacaactgatttgcagctataggcaaggtagatgaagttgctttgccagtaaggaaaaatagtaatctttaagaaattgactcattgtttaatttctggggattttctttatacttctaagcaggctcttatcttttattggacataatatgattttgaaaaagcacagtgcctgacacattgcaaacactcaccaactgcttgctgaggtgacagagtcacaaaagtctgcattcttgtgcctgatgatgcattttgcgtacctcatacaggctccttgcccacactatggaatgacagcagccagtgcagggaggttaagtgacatttaatgagtgaagcacttagcactctctaggtaataagatagtggtaattactagtgttttggcaaatgaaaaatgccctgaaatagccaaatgtctgattaatgttggcaacttagaagtcctataatccaactaccagccaaagcagggagcctttctataatttgcctttttttttttttttttcaaaatctgagtcttctaaaatcttattattcccatttttaccaattgaggctcctgtagcaaataagacctcttgatattttcaaggactggttagaggatttctttcaaccttcacatgaacaaaacagcctatgggtcaaaataatgaaatccacccctgcctgctagatacttgtcaccttgctaaaatgcaagggcctggtccattcattttccaaatgcaggagtcttggtgcacttctcactcttcctgcctgttcatctctttcatgcccacacagacctgtttcctttttgtctcatcaacgcctcattcatcctcattactgaggcgtgtccaatgctttttgacatctttatagcagtgctgtttcctgggctcaggaaccacactgagcttgagatactgctggaaggaaccatgtggagagaaggtttgggagaactttgagagagacttagtttggcccagcatgtaaaacttcagtcctgaacatttatagggttttatagaagggcatcctccagggctggtccattcagagaaatgctgcatgctgccgtcatggaatgtggcccacaggacaccagagccgtgagaaccggagagcagacttccctcacggctgggctgagcaaaccctccaaagccctcctcacgcagttactaacaatagcatgggcttacagcacaagcacgtgttctcacctttttcctatgccctggactaaggtttggccagtgtaatcatataaggccatcctgacattgtttctgtgtttcaaaatttggatttttatttacattagaactacattgctcctagtagaacattacctttaggggactaattttccatggagaactatttcagcatattgcatgctgctcagaccccaagtcagatatgcccaccaagccagatgaagctacacaaatgtggtatttaaatgcattttgtacagtgacttcagagtatctcacatgacatgggtgtaaactggctggggagaaaatgatgcttgttcacctcttcctccagccgtggttaggtggtcctaggggtagcagagggaagggaggattttgtgcagtcaagatttgcttttccatccttgtcttctgaatgtctaaaatctctgcatctttctgaagtttaacaactgtctccagaggtttgccaggcagcagctctcagaagtttccaaagctttgcagaatcttagatctggaattaaagaattcaagcccgaattgtgagaaccagatattactcaacagaaagctctttctaaggaatctgagctgttcactggtggacagtggtggggcttgagtgctccttgttaataggatgggccatgcaccctctctggatattcaccaaggcctcttcagaatagggtttgttctggctagaagcgtggtctagaagatggctaagctctttgccagctctcatttggagttttattattgcataaaatcttcgctcactctgcaaatcttacgtaatctggcaccttcggcaccaggtggtgcaggggcacttctaagtgggctctttttgttacagcacaactctcagacagtcctgtgggtctttggattcgtcagcattccagcaaactagccctgcttagaagttagcacaagacggcagaatgcaggaccccgtaggcaaaatcacaaccttgctattaaaaaaaatttttttttacatacacatttgcaggtgttccctagagtgtggtgttttgaatttgctctttgtcatctgtataattgccaaatgattatagtgatacacatgacctgcattcacttttttctagtttccttaattatgtttagaataaattcgtttccctagaccgagaaccacaaacaggtagtgtggagcatacaccgaatttagaagcatgtggataaggtcagtgctcacactgcctagtccacagggagaggatgctgcatgaatatatacttgcctctgagtggaggagaaatcgtggcatgaaagagagagtaccagtgatgacttcttatccctggagctgggctttcactgctacccatatcccagccctgcgagtctgttctagccagcacagacaccgcagatccggaactgaatgttcctaaatggcgcagccaatccaggcttttcagaaactgggcaaaaacattaaaatggggacgatcgggtcttccgcagtggtccaacacaggatttcttttaaatgtttcaaaaacatgtccttaaaatttcagcctgcttcttagcgagtgggccagttttgcttaaaactggtgggggggcgggggggaagtttttaaaaattgccaaaaagttagatgcaaatgtattactgtataaagcaaagctgtatatactaaacattttttagcagagtaatatttatttgcatagtctatttattgtattcgtattacactgttattaaatactgggatgaaatcagtgacctgaagcaagaaatcttgccttttaatgtatcattaattagggctgctgtgatattgtcagcttgcattaacaattagaagatagagaacccgccatcagggtgtctacctaacttctcagggactacacttggtagttttccaccatttaaagaactggtaaatatgaaacatttgttgagttaccagaattgccattaacagtgttttctttcccatattccatgctttctgcctctgtgtatatatataatatatatgtatatgactgtgctgtgtatttatcgaagctagtaagcaataatttatatgtaaaaatggccaagcaatataaggttaaaacttatataagtaacccttaccttatcttgtattttcaatttttttttaaaactgcttttccaaatatgagactatgttaaagacact

SEQ ID NO: 183 - protein, 228 aa, Homo sapiens
MSVSEIFVELQGFLAAEQDIREEIRKVVQSLEQTAREILTLLQGVHQGAGFQDIPKRCLKAREHFGTVKTHLTSLKTKFPAEQYYRFHEHWRFVLQRLVFLAAFVVYLETETLVTREAVTEILGIEPDREKGFHLDVEDYLSGVLILASELSRLSVNSVTAGDYSRPLHISTFINELDSGFRLLNLKNDSLRKRYDGLKYDVKKVEEVVYDLSIRGFNKETAAACVEK

SEQ ID NO: 184 - DNA, 3408 bp, Homo sapiens
cctttggacgcgcgcctcggttccgaacgcagcggacggcgcctcaggcagcgcggcggacagcccgtcctccggcgcgccgcgagcctcggaggaccctagcgacggtcgtggcgtaagaccggggggacgcggcggtagcggcggccgttgcgattgattgcgctggttgcctgcggcgtccacttccttggccgcccttgctacactggctgattgttgtgcagccggcgccatgtctgtgagcgagatcttcgtggagctgcagggctttttggctgccgagcaggacatccgagaggaaatcagaaaagttgtacagagtttagaacaaacagctcgagagattttaactctactgcaaggggtccatcagggtgctgggtttcaggacattccaaagaggtgtttgaaagctcgagaacattttggtacagtaaaaacacatctaacatctttgaagaccaaatttcctgctgaacagtattacagatttcatgagcactggaggtttgtgttgcagcgcttggtcttcttggcagcatttgttgtgtatttggaaacagaaacactagtgactcgagaagcagttacagaaattcttggcattgagccagatcgggagaaaggatttcatctggatgtagaagattatctctcaggagttctaattcttgccagtgaactgtcgaggctgtctgtcaacagcgtgactgctggagactactcccgacccctccacatctccaccttcatcaatgagctggattccggttttcgccttctcaacctgaaaaatgactccctgaggaagcgctacgacggattgaaatatgacgtgaagaaagtagaggaagtggtctatgatctctccatccggggctttaataaggagacggcagcagcttgtgttgaaaaataggaggctctccttgctcctggccttgctgacctcagcggttgccaggaaggggtgagcacagagtgcctcttacggtagttaggatgctcagttgctaaacactgcgctttattttcttaaccagttgtggtgtgagtatcagaattgaaacacttttttgggggtaaaaaatatagcctttacatggacagaattttttttgttgtttcagtgaatatgcctgtaattcagtgtatttcagttccgtcagaaagtgtaaatgttagtttcttggtaaagtccttttcttgcttaccttgactgttgatgtactgattgagaagttcattgtctcgtttgtgattcttccagatgtgatgcttgatattttctatatgcgagttagccatccacacccaggcatagcctggatacagtataaaaatagataattaaaaagatggttgccaagcaaggaaaacttattttatattttcccttccttattttaagcattgtgagtaaatcagatgttgaattcttttgccaagggaattatagctgcaggttctctctcactgccatcaaactgtaaaagattaaactgcgaagtcaagctcaacagattattttggaaagtttttgtattaagggatttagtaacatcattttgttttccaccaggcagggagtagggcttagtgttttaaaacacctctgctttctgatgttgccttaatattctgctattgcagcaattaaaaattgtcttcatgtacatttggaactaacacgtgatgtgatatattcctaaactatgaaacctttttcctagtagtcagctagatcatttgttctgggagtataaagccacccacgtaagttaataagcaaaatcctgactattatgttgttagagaaaaatgctttgctttgtctggaagaaagataaaatagtgaattataaataagtcaggccgggcgtggtggctcacacctgtaatcccagcacactgggaggccgaggcagggggactgcttgagctcaggagttcgagaccagcctgggcaacaaagtgagactccatctctatataaaaacaaaaaccacgaaagcacacacaaaataaatcagtgggatttggtaatgtgttttagagtaagaaatttcaggttgttggtgactatcccaacagtcatgttttaaatgtacagtttggggcaagtcatgtaaatactgttggtggtcttccccacacgccccaattttcaggtagtactaagagtatgtgccaggaaactcttgctattgaattgagatgattaaaatggtgacttaatccgtagttattttgcacccactgaaaggaaagtgctttccagaataatatgaagtatctaaaagtgtcaccttttcttgcctgatcaacaatttgggcttcctgtttgtacaaggggccatttggcatacctttcacagcttttatcaggccaagttaaaggctgactacattttttcatcatgaggaaagcagttgaaatgaggcatgagttactgtgcattgggattttagaacaattttcttgtgacagctctttttgtgaagttaggttcttaaaagtgcccatgatggtcacttaaaatgtgcagtaatagcactgccaggatcaagcatgaaaggcttttaaattagatcatcccacagacaatacgtttgataatagttttttcttttaacctctttaagtattgattctgcttgagaatattgaagtacttgccagaagttgtggatttcagttttaacaaatgctattaaagtggagaagcacactctggtcttggaattccatttgaggatttagaagtgtcatgtttataactattcagttgtgtttgttgctggcttgttgtaaagcaataaaatttttttggtctttttgtaagtgagtgtgctgctgtaagaaatctcccatgtgcataacaaattctgaatattttttgaggctaaagaagaccggggtgacaagcagatactgctgtgtaatggttacactaaccaaaagacaccagccactcagagttctatactgtaaagcgcagataacatttgtgtgttataccttgattggggaattaaaagtcatttaactgaagatgttgagaaacctgggctctggttttagtataccggaattacttttttccaattttagaaaatcaagcaggttagagaaaatagagatgaattaggggacactgtcttatggattcatttataagaagagaaccagccatatacacttggggagatttgccacatcttaaacttgaataatagtatgagtaatgcttaagggagtttaatagagaaggaaagctttggcagtgttttgagaacttaagtggctaaagagatgagacaaacatgcaggtcgctactggcatagtttcataattgtgtactcggaaattaaagtttgcttgtttcttggtctggattaaa

SEQ ID NO: 185 - protein, 405 aa, Homo sapiens
MERLQKQPLTSPGSVSPSRDSSVPGSPSSIVAKMDNQVLGYKDLAAIPKDKAILDIERPDLMIYEPHFTYSLLEHVELPRQRERSLSPKSTSPPPSPEVWADSRSPGIISQASAPRTTGTPRTSLPHFHHPETSRPDSNIYKKPPIYKQRESVGGSPQTKHLIEDLIIESSKFPAAQPPDPNQPAKIETDYWPCPPSLAVVETEWRKRKASRRGAEEEEEEEDDDSGEEMKALRERQREELSKVTSNLGKMILKEEMEKSLPIRRKTRSLPDRTPFHTSLHQGTSKSSSLPRYGRTTLSRLQSTEFSPSGSETGSPGLQNGEGQRGRMDRGNSLPCVLEQKIYPYEMLVVTNKGRTKLPPGVDRMRLERHLSAEDFSRVFAMSPEEFGKLALWKRNELKKKASLF

SEQ ID NO: 186 - DNA, 2727 bp, Homo sapiens
cacgagaagacaggaggaagaaagggagagagggccaggcagtcgcactgtgaacagaacaggagaaggcgaagcggggcaaagttccctgcccaccgacgccagcctgcttggatgacttgcctcgtttcataattcacttactgtctgcaccagccggcctcagcctggctggaccctgctgcctgtgtggcccggagccagaggcccccacactcccagctgctcttctacagatgccatcaacgagcaggactctgggtggctccactgtctaagcctggagagtcaccgccgagggatgaggacgcgccagcccgggggaacgcgccagctgctttcgcggccccaagcgcgcagtgcccagcagccgcgccgagcctgacacgctgtcctctcccctcgcgcacagggctctgcgagtgacccggcgggcgagctccgtgctgcatggaacggctgcagaagcaaccacttacctcccccgggagcgtgagcccctcccgagattccagtgtgcctggctctccctccagcatcgtggccaagatggacaatcaggtgctgggctacaaggacctggctgccatccccaaggacaaggccatcctggacatcgagcggcccgacctcatgatctacgagcctcacttcacttattccctcctggaacacgtggagctgcctcgccagcgcgagcgctcgctgtcacccaaatccacatcccccccaccatccccagaggtgtgggcggacagccggtcgcctggaatcatctctcaggcctcggcccccagaaccactggaaccccccggaccagcctgccccatttccaccaccctgagacctcccgcccagattccaacatctacaagaagcctcccatctataagcagagagagtccgtgggaggcagccctcagaccaagcacctcatcgaggatctcatcatcgagtcatccaagtttcctgcagcccagcccccagaccccaaccagccagccaaaatcgaaaccgactactggccatgccccccgtctctggctgttgtggagacagaatggaggaagcggaaggcgtctcggaggggagcagaggaagaggaggaggaggaagatgacgactctggagaggagatgaaggctctcagggagcgtcagagagaggaactcagtaaggttacttccaacttgggaaagatgatcttgaaagaagagatggaaaagtcattgccgatccgaaggaaaacccgctctctgcctgaccggacacccttccatacctccttgcaccagggaacgtctaaatcttcctctctcccccgctatggcaggaccaccctgagccggctacagtccacagagttcagcccatcagggagtgagactggaagcccaggcctgcagaacggagagggccagagggggaggatggaccgggggaactccctgccctgtgtgctggagcagaagatctatccctatgaaatgctagtggtgaccaacaaggggcgaaccaagctgccaccgggggtggatcggatgcggcttgagaggcatctgtctgccgaggacttctcaagggtatttgccatgtcccctgaagagtttggcaagctggctctgtggaagcggaatgagctcaagaagaaggcctctctcttctgatggcccccacctgctccgggacggcccccttacccctgctgcttcagggtttttccccggcgggttgggaggggcaggaggtggggtggaaatagggtgggctcctttcctcaggtagagtggggggccaaaacctctgcagtccccggcagtgagctatggactttcttccccctcacgaggctgggggcctcctgctctcgtccctggccctccctgtacagggcaaagccagtctgggctctggcacacagagttcatgtttgccgccctctccctgcccctcaccccagaggtgagaggaatgaggggcattggtggttaggccggttggctgtcttgaacagctggagggaagatgcaggggtgggaagcggccaggcagaaagagctccaggctcttgtgtcgcccacccagccctcccatactcactcctgacagctttcctgcactgcagcttcctgctcctctgactctagtgggaacaggccccagctcagcctccgcgagggaggtcacccctccacttcagcttgccctgacctccgctcgcaaaccccgagcttccaagccttttgctccagccctgcggcttccccagaagcctgggcttagggtggagatgccgcctacccgatcctggccctccacctgcctccaggccacgaaatgggaattccagcactaagccaggcaccgggcagaagctgggccttccgcctcccttggatggggtcaagaggccaggcctggcacattttggagtgtcctggctaccagctctcacacctacacccacgcaccccctcacacactatgctctctcaagaatgtaatttattggggcccccccagctgctttcctcacctgcccctgccctaccttacacccccagcttgacttctttccagtccacgtggatataatgatatctatatttttgcccaggtctgggtattgctcctgcccagaccctgacatccctttccactgtgtgtgtgaccatgctgggggagggggactctgcttggaattaaaaggttgctttgggtcccta

SEQ ID NO: 187 - protein, 689 aa, Homo sapiens
MGSSGLGKAATLDELLCTCIEMFDDNGELDNSYLPRIVLLMHRWYLSSTELAEKLLCMYRNATGESCNEFRLKICYFMRYWILKFPAEFNLDLGLIRMTEEFREVASQLGYEKHVSLIDISSIPSYDWMRRVTQRKKVSKKGKACLLFDHLEPIELAEHLTFLEHKSFRRISFTDYQSYVIHGCLENNPTLERSIALFNGISKWVQLMVLSKPTPQQRAEVITKFINVAKKLLQLKNFNTLMAVVGGLSHSSISRLKETHSHLSSEVTKNWNEMTELVSSNGNYCNYRKAFADCDGFKIPILGVHLKDLIAVHVIFPDWTEENKVNIVKMHQLSVTLSELVSLQNASHHLEPNMDLINLLTLSLDLYHTEDDIYKLSLVLEPRNSKSPTSPTTPNKPVVPLEWALGVMPKPDPTVINKHIRKLVESVFRNYDHDHDGYISQEDFESIAANFPFLDSFCVLDKDQDGLISKDEMMAYFLRAKSQLHCKMGPGFIHNFQEMTYLKPTFCEHCAGFLWGIIKQGYKCKDCGANCHKQCKDLLVLACRRFARAPSLSSGHGSLPGSPSLPPAQDEVFEFPGVTAGHRDLDSRAITLVTGSSRKISVRLQRATTSQATQTEPVWSEAGWGDSGSHTFPKMKSKFHDKAAKDKGFAKWENEKPRVHAGVDVVDRGTEFELDQDEGEETRQDGEDG

SEQ ID NO: 188 - DNA, 4204 bp, Homo sapiens
gataccctttacactagattagcaggcaaaactatgatggtttgtgatatccatgcttgtagaagtaataagaagaaagggaacacagaagctttattttatagtggagtcctgactctaggccttaataattgcatggttttggagttttcttgaagtacaactaaggacaggtcaccactaggcactaacatcgctgacttgcatgattatggagatggtctatctgatgctgaaaatgtctctagttttttgacaacggctaaataaccatgggatcaagtggccttgggaaagcagcaacattagatgaactgctgtgcacttgcattgagatgtttgatgacaatggagagctggataatagttatttgccaagaatagttctactgatgcaccgatggtatttatcttccactgaattggcagaaaaacttctctgcatgtatcgaaatgccactggagaaagctgcaatgaatttcgattaaagatctgctacttcatgaggtactggattctgaagtttcctgcagagtttaatttggatcttggtttgattcgtatgactgaggaatttcgggaagtagctagtcaactaggatatgaaaaacacgtcagcctcatcgacatatccagcattccttcctatgactggatgagaagagtcacacagaggaaaaaagtatccaagaagggaaaagcctgtctgctgtttgaccatctggagcccattgaattggctgagcacctcacttttctggagcataaatcttttagaaggatctcattcactgattaccaaagctatgtcatccatggctgcctggagaataatccaaccttggaaagatcgattgctttatttaatggaatctctaagtgggtccagttgatggttcttagcaaaccaaccccccagcaaagggcagaagtcatcacaaagtttatcaatgttgcaaagaagctccttcagctcaaaaattttaacaccctgatggcagtggtgggaggcctcagtcatagttccatttcacgcctcaaagagacccattctcatctttcttcagaagttacaaagaactggaatgaaatgacagagttggtctcctccaacggcaattactgcaattaccgcaaggcctttgccgactgcgatggcttcaaaatccccatccttggagtacacttgaaagacttgatagctgtccatgtcattttcccagactggacagaggagaacaaagtgaacattgtgaaaatgcaccagctctccgttaccctgagtgaactagtctccctgcagaatgcctctcaccacttagaacccaacatggatttgatcaacctgctcacgctttccctggacctctatcacactgaagatgatatttacaaactgtcactggtgctggagcctagaaattctaaatcgcctacctcccctacgacgcccaacaagcctgtggtacccctggagtgggcattaggggtgatgccaaagccagaccccacggtcatcaacaagcacataaggaaattagtggagtctgtatttagaaactatgatcacgaccatgatgggtacatttcccaagaggactttgaaagtatagctgccaattttcccttcttggattccttctgtgttctggacaaagatcaggatggcctaattagtaaagatgaaatgatggcttacttcctgagagctaaatcccaactacactgtaaaatgggaccaggatttatccataattttcaggagatgacctatctcaagccaaccttctgcgaacactgtgcgggatttctctggggcataatcaagcaaggatacaaatgcaaagactgtggagccaattgtcacaaacagtgcaaagacctcctggttctggcctgcaggagatttgcccgggcgccctccttgagcagtggtcatgggtcactgcctggaagcccctcgctgcccccagcgcaggatgaggtgtttgagttccctggagtcactgctggacacagggatttagacagcagagccatcacactggttacaggctcttctcgcaagatctctgtgaggctacagagggccaccaccagccaggccacccagactgaacctgtctggtcagaggctggctggggggactcggggtcccacaccttccctaaaatgaaatccaagttccatgacaaagcagcaaaggacaaaggctttgccaaatgggaaaatgagaagcccagggtgcatgctggtgtggatgttgtagaccggggcacggagtttgaacttgaccaggatgaaggagaagagaccagacaggatggtgaggatggctgacttcaggctgcggaaactgaaggcaataatgttggcttttggaaggggcaagacgagaaactctgaagaaagctctgactctcaggaagttatctggaaagatacctggatgtttactgccttgggacactgtgggatctccatgtttggactatgggacagagaattgaccctaactaactatgaactatttatttcctcctcccctacccctagttaagtgccacaaagactgtgttatgtagtcagtacttttctcatgtatctttctctagaccatttatatacgggtgaaatgaaagcttttttgcatgtacttgatactcagtctgtaaactcagactttgctttttttgtgagactatcctttcaatatttttataaacttttgtgtgtgctgtggcagggaacagttaacaaggagtttatttagaggggtttttttcattttttgtttttcttgttttgttttgttttgttttgttcttcttggtgtgctttttggatgggaccagaacttaacattttcctgaggactaggaagctcatcagacactggaatgcagtgattcttctaatgatggtcaactgcaaggagaaactgtttacatccttcccactacacagttgctatgatatgtaacaagtcacacatgtatatatcacacaagtcttaccaattctgcgtcactaggaagctatagcatggtcgtgaaagctctcctaatacttacttaaatagccatggaagaaaattatgcttgtcccttctgactgggttaagccatctttcttaagattcctgaagtagaaatagcaattaagaaattaattcaagttttgacggttaacatttagcagaaaaacaaaccattgaataagctactaggtgaaatgcaaaacaaccatcaatttttttaaactcaataattttgtgaaaaaaaaaaccaccaccaaacttttggttgtaaaagagaacccttgttcccttcctaagaaactgccttccacaattaaagaatactcatagaaagaaaataatcataaatcatatttgattaacatttcatttaagcttttaaaatatcaattttttaaatagctcccatttacccaaaataactagttatgggtctatttcttccatgattagaggagagagaacttgattcaagatactgaaaaatagagctgggactgagcctgtgaatgacaggaatgatctattaccaggtgactagtcggaaactacacagaggtgcactggtctgcatttgggggctaaagtgtatatattccatttaaaatggaatttgtttgtatttggggcagtcttcagtaaagcctttctcctttcttttctccattgaggacagttctgctcagcaaaattgttgagtacctgttctgggcaggtcccacgctatatgcacaaagttaagaaaaacttggtcttagcccttgggagctgacagcccatgggcattaaggcaaagtagttccagtgatttaaaatacggttccaaatacgctaaaaccaacttgtgccaaccagatttacagattggaaatactgcagatgatgtgaagttatcagttggaggagctgtgattaagctggataataagagaacgtgccatctgtaaagcactcagaaggcagccatccctagatgttggtttcatgtatattacactatctactactatccataaatgcaatgatatgcatgttaacaacattaaaaacagcaaacagcaatctaagtacagaaaagctctttgtgtgtttaaaaaaattgaagaaaattcaggaagaaacgtgttaataaacattgtactgttcttttgcttctcaaagg

SEQ ID NO: 189 - protein, 142 aa, Homo sapiens
MSDSLVVCEVDPELTEKLRKFRFRKETDNAAIIMKVDKDRQMVVLEEEFQNISPEELKMELPERQPRFVVYSYKYVHDDGRVSYPLCFIFSSPVGCKPEQQMMYAGSKNRLVQTAELTKVFEIRTTDDLTEAWLQEKLSFFR

SEQ ID NO: 190 - DNA, 561 bp, Homo sapiens
aatcatgtctgactccctggtggtgtgcgaggtagacccagagctaacagaaaagctgaggaaattccgcttccgaaaagagacagacaatgcagccatcataatgaaggtggacaaagaccggcagatggtggtgctggaggaagaatttcagaacatttccccagaggagctcaaaatggagttgccggagagacagcccaggttcgtggtttacagctacaagtacgtgcatgacgatggccgagtgtcctaccctttgtgtttcatcttctccagccctgtgggctgcaagccggaacaacagatgatgtatgcagggagtaaaaacaggctggtgcagacagcagagctcacaaaggtgttcgaaatccgcaccactgatgacctcactgaggcctggctccaagaaaagttgtctttctttcgttgatctctgggctggggactgaattcctgatgtctgagtcctcaggtgactggggacttggaaccctaggacctgaacaaccaagactttaaataattttaaatgcaaaaactcagaaaaaaaaaaaaaaa

SEQ ID NO: 191 - protein, 328 aa, Homo sapiens
MLPRVGCPALPLPPPPLLPLLPLLLLLLGASGGGGGARAEVLFRCPPCTPERLAACGPPPVAPPAAVAAVAGGARMPCAELVREPGCGCCSVCARLEGEACGVYTPRCGQGLRCYPHPGSELPLQALVMGEGTCEKRRDAEYGASPEQVADNGDDHSEGGLVENHVDSTMNMLGGGGSAGRKPLKSGMKELAVFREKVTEQHRQMGKGGKHHLGLEEPKKLRPPPARTPCQQELDQVLERISTMRLPDERGPLEHLYSLHIPNCDKHGLYNLKQCKMSLNGQRGECWCVNPNTGKLIQGAPTIRGDPECHLFYNEQQEACGVHTQRMQ

SEQ ID NO: 192 - DNA, 1433 bp, Homo sapiens
attcggggcgagggaggaggaagaagcggaggaggcggctcccgctcgcagggccgtgcacctgcccgcccgcccgctcgctcgctcgcccgccgcgccgcgctgccgaccgccagcatgctgccgagagtgggctgccccgcgctgccgctgccgccgccgccgctgctgccgctgctgccgctgctgctgctgctactgggcgcgagtggcggcggcggcggggcgcgcgcggaggtgctgttccgctgcccgccctgcacacccgagcgcctggccgcctgcgggcccccgccggttgcgccgcccgccgcggtggccgcagtggccggaggcgcccgcatgccatgcgcggagctcgtccgggagccgggctgcggctgctgctcggtgtgcgcccggctggagggcgaggcgtgcggcgtctacaccccgcgctgcggccaggggctgcgctgctatccccacccgggctccgagctgcccctgcaggcgctggtcatgggcgagggcacttgtgagaagcgccgggacgccgagtatggcgccagcccggagcaggttgcagacaatggcgatgaccactcagaaggaggcctggtggagaaccacgtggacagcaccatgaacatgttgggcgggggaggcagtgctggccggaagcccctcaagtcgggtatgaaggagctggccgtgttccgggagaaggtcactgagcagcaccggcagatgggcaagggtggcaagcatcaccttggcctggaggagcccaagaagctgcgaccaccccctgccaggactccctgccaacaggaactggaccaggtcctggagcggatctccaccatgcgccttccggatgagcggggccctctggagcacctctactccctgcacatccccaactgtgacaagcatggcctgtacaacctcaaacagtgcaagatgtctctgaacgggcagcgtggggagtgctggtgtgtgaaccccaacaccgggaagctgatccagggagcccccaccatccggggggaccccgagtgtcatctcttctacaatgagcagcaggaggcttgcggggtgcacacccagcggatgcagtagaccgcagccagccggtgcctggcgcccctgccccccgcccctctccaaacaccggcagaaaacggagagtgcttgggtggtgggtgctggaggattttccagttctgacacacgtatttatatttggaaagagaccagcaccgagctcggcacctccccggcctctctcttcccagctgcagatgccacacctgctccttcttgctttccccgggggaggaagggggttgtggtcggggagctggggtacaggtttggggagggggaagagaaatttttatttttgaacccctgtgtcccttttgcataagattaaaggaaggaaaagt

SEQ ID NO: 193 - protein, 226 aa, Homo sapiens
DMELLNDRFRKTTLQVDTLNAELAAERSAAQKSDNARQQLERQNKELKAKLQELEGAVKSKFKATISALEAKIGQLEEQLEQEAKERAAANKLVRRTEKKLKEIFMQVEDERRHADQYKEQMEKANARMKQLKRQLEEAEEEATRANASRRKLQRELDDATEANEGLSREVSTLKNRLRRGGPISFSSSRSGRRQLHLEGASLELSDDDTESKTSDVNETQPPQSE

SEQ ID NO: 194 - DNA, 971 bp, Homo sapiens
cgacatggagctgctcaacgaccgcttccgcaagaccactctacaggtggacacactgaacgccgagctagcagccgagcgcagcgccgcccagaagagtgacaatgcacgccagcaactggagcggcagaacaaggagctgaaggccaagctgcaggaactcgagggtgctgtcaagtctaagttcaaggccaccatctcagccctggaggccaagattgggcagctggaggagcagcttgagcaggaagccaaggaacgagcagccgccaacaaattagtccgtcgcactgagaagaagctgaaagaaatcttcatgcaggttgaggatgagcgtcgacacgcggaccagtataaagagcagatggagaaggccaacgctcggatgaagcagcttaaacgccagctggaggaagcagaagaagaagcgacgcgtgccaacgcatctcggcgtaaactccagcgggaactggatgatgccaccgaggccaacgagggcctgagccgcgaggtcagcaccctgaagaaccggctgaggcggggtggccccatcagcttctcttccagccgatctggccggcgccagctgcaccttgaaggagcttccctggagctctccgacgatgacacagaaagtaagaccagtgatgtcaacgagacgcagccaccccagtcagagtaaagttgcaggaagccagaggaggcaatacagtgggacagttaggaatgcacccggggcctcctgcagatttcggaaattggcaagctacgggattccttcctgaaagatcaactgtgtcttaaggctctccagcctatgcatactgtatcctgcttcagacttaggtacaatgctccccttttatatatagacacacacaggaaacatatattaaacagattgtttcatcattgcatctattttcatatagtcatcaagagaccattttataaaacatggtaagaccccg

SEQ ID NO: 195 - protein, 158 aa, Homo sapiens
MSSAIERKSLDPSEEPVDEVLQIPPSLLTCGGCQQNIGDRYFLKAIDQYWHEDCLSCDLCGCRLGEVGRRLYYKLGRKLCRRDYLRLFGQDGLCASCDKRIRAYEMTMRVKDKVYHLECFKCAACQKHFCVGDRYLLINSDIVCEQDIYEWTKINGMI

SEQ ID NO: 196 - DNA, 2304 bp, Homo sapiens
gaattcgtccaaactgaggatcacaagtctccacattctgagtaggaggatgagggtctgagttaggatttgggtcctgcagggcttgctaaggaatcccctgatggcctaggattccacgcagagcacatctggtgtgagagagctcgctgcaagggtgaaggctccgccctatcagatagacaaccaggccaccaagaggcccagccctccaaaccctggatttgcaacatcctcaaagaacagcaacgggccttgagcagaattgagaaggaaatacccccacctgccctcagccgttaagtgggctttgctattcacaagggcctctgggtgtcctggcagagaggggagatggcacaggcaccaggtgctagggtgccagggcctcccgagaaggaacaggtgcaaagcaggcaattagcccagaaggtatccgtggggcaggcagcctagatctgatgggggaagccaccaggattacatcatctgctgtaacaactgctctgaaaagaagatatttttcaacctgaacttgcagtagctagtggagaggcaggaaaaaggaaatgaaacagagacagagggaagcctgagccaaaatagaccttcccgagagaggaggaagcccggagagagacgcacggtcccctccccgcccctaggccgccgccccctctctgccctcggcggcgagcagggcgccgcgacccggggccggaaaggtgccaggggctccgggcggccgggcgggcgcacaccatccccgcgggcggcgcggagccggcgacagcgcgcgagagggaccgggcggtggcggcggcgggaccgggatggaagggagcgcggtgactgtccttgagcgcggaggggcgagctcgccggcggaggccgagcaagcggaggcaggagcggcggcgacggcggcggcggcggcggcgcccgagcacccgagggggtccgagccccggcagccggccagccccgcgccacaaagggagcgcccccgccgcccggcaccccgcctccctccccaatgtcctcggccatcgaaaggaagagcctggacccttcagaggaaccagtggatgaggtgctgcagatccccccatccctgctgacatgcggcggctgccagcagaacatcggggaccgctacttcctgaaggccatcgaccagtactggcacgaggactgcctgagctgcgacctctgtggctgccggctgggtgaggtggggcggcgcctctactacaaactgggccggaagctctgccggagagactatctcaggctttttgggcaagacggtctctgcgcatcctgtgacaagcggattcgtgcctatgagatgacaatgcgggtgaaagacaaagtgtatcacctggaatgtttcaagtgcgccgcctgtcagaagcatttctgtgtaggtgacagatacctcctcatcaactctgacatagtgtgcgaacaggacatctacgagtggactaagatcaatgggatgatataggcccgagtccccgggcatctttggggaggtgttcactgaagacgccgtctccatggcatcttcgtcttcactcttaggcactttgggggtttgagggtggggtaagggatttcttaggggatggtagacctttattgggtatcaagacatagcatccaagtggcataattcaggggctgacacttcaaggtgacagaaggaccagcccttgagggagaacttatggccacagcccatccatagtaactgacatgattagcagaagaaaggaacatttaggggcaagcaggcgctgtgctatcatgatggaatttcatatctacagatagagagttgttgtgtacagacttgttgtgactttgacgcttgcgaactagagatgtgcaattgatttcttttcttcctggctttttaactcccctgtttcaatcactgtcctccacacaagggaaggacagaaaggagagtggccattctttttttcttggcccccttcccaaggccttaagctttggacccaagggaaaactgcatggagacgcatttcggttgagaatggaaaccacaacttttaaccaaacaattatttaaagcaatgctgatgaatcactgtttttagacaccttcattttgaggggaggagttccacagattgtttctatacaaatataaatcttaaaaagttgttcaactattttattatcctagattatatcaaagtatttgtcgtgtgtagaaaaaaaaaacagctctgcaggcttaataaaaatgacagactgaaaaaaaaaaaa

SEQ ID NO: 197 - protein, 398 aa, Homo sapiens
MALLRRPTVSSDLENIDTGVNSKVKSHVTIRRTVLEEIGNRVTTRAAQVAKKAQNTKVPVQPTKTTNVNKQLKPTASVKPVQMEKLAPKGPSPTPEDVSMKEENLCQAFSDALLCKIEDIDNEDWENPQLCSDYVKDIYQYLRQLEVLQSINPHFLDGRDINGRMRAILVDWLVQVHSKFRLLQETLYMCVGIMDRFLQVQPVSRKKLQLVGITALLLASKYEEMFSPNIEDFVYITDNAYTSSQIREMETLILKELKFELGRPLPLHFLRRASKAGEVDVEQHTLAKYLMELTLIDYDMVHYHPSKVAAAASCLSQKVLGQGKWNLKQQYYTGYTENEVLEVMQHMAKNVVKVNENLTKFIAIKNKYASSKLLKISMIPQLNSKAVKDLASPLIGRS

SEQ ID NO: 198 - DNA, 1530 bp, Homo sapiens
aatcctggaacaaggctacagcgtcgaagatccccagcgctgcgggctcggagagcagtcctaacggcgcctcgtacgctagtgtcctcccttttcagtccgcgtccctccctgggccgggctggcactcttgccttccccgtccctcatggcgctgctccgacgcccgacggtgtccagtgatttggagaatattgacacaggagttaattctaaagttaagagtcatgtgactattaggcgaactgttttagaagaaattggaaatagagttacaaccagagcagcacaagtagctaagaaagctcagaacaccaaagttccagttcaacccaccaaaacaacaaatgtcaacaaacaactgaaacctactgcttctgtcaaaccagtacagatggaaaagttggctccaaagggtccttctcccacacctgaggatgtctccatgaaggaagagaatctctgccaagctttttctgatgccttgctctgcaaaatcgaggacattgataacgaagattgggagaaccctcagctctgcagtgactacgttaaggatatctatcagtatctcaggcagctggaggttttgcagtccataaacccacatttcttagatggaagagatataaatggacgcatgcgtgccatcctagtggattggctggtacaagtccactccaagtttaggcttctgcaggagactctgtacatgtgcgttggcattatggatcgatttttacaggttcagccagtttcccggaagaagcttcaattagttgggattactgctctgctcttggcttccaagtatgaggagatgttttctccaaatattgaagactttgtttacatcacagacaatgcttataccagttcccaaatccgagaaatggaaactctaattttgaaagaattgaaatttgagttgggtcgacccttgccactacacttcttaaggcgagcatcaaaagccggggaggttgatgttgaacagcacactttagccaagtatttgatggagctgactctcatcgactatgatatggtgcattatcatccttctaaggtagcagcagctgcttcctgcttgtctcagaaggttctaggacaaggaaaatggaacttaaagcagcagtattacacaggatacacagagaatgaagtattggaagtcatgcagcacatggccaagaatgtggtgaaagtaaatgaaaacttaactaaattcatcgccatcaagaataagtatgcaagcagcaaactcctgaagatcagcatgatccctcagctgaactcaaaagccgtcaaagaccttgcctccccactgataggaaggtcctaggctgccgtgggccctggggatgtgtgcttcattgtgccctttttcttattggtttagaactcttgattttgtacatagtcctctggtctatctcatgaaacctcttctcagaccagttttctaaacatatattgaggaaaaataaagcgattggtttttcttaaggtaaaaaaaaaaaaaaaaaa

SEQ ID NO: 199 - protein, 1614 aa, Homo sapiens [sequence omitted]

SEQ ID NO: 200 - DNA, 7381 bp, Homo sapiens
ccgtccgctaagtgcctgggctctcccgctcgcgtcccagtctgcgggcctccggggcagcggcgaggccggagcgtcgcggcggagaggacgagaccgggacaagaccagggcaggagggagccggccagccgcgagaaccccgcacgcccggcaagatgctgtcctggcggctgcagacgggccccgagaaggccgagctccaggagctcaacgcccggctctatgactacgtgtgtcgggtgcgggagctggagcgcgaaaacctactcctggaggaggagctgcgcggccggcgcgggcgagagggcctgtgggccgaggggcaggcccgctgcgccgaggaggcgcgcagcttgcggcagcagctggacgagctgagctgggccactgcgctggcggagggcgagcgggacgctctgcggcgcgagctgcgggagctgcagcgcctggatgcggaggagcgcgccgcccgcggccgcctggacgccgagctgggtgcgcagcagcgcgagctgcaggaggcgctgggcgcgcgcgccgccctcgaggcgctgctgggccgactgcaggccgagcgccgaggcctcgacgcggcccacgaacgcgacgtgcgggagctgcgcgcgcgcgccgccagccttaccatgcatttccgcgcccgcgccaccggccccgccgcgccgccgccacgcctgcgggaggtgcacgacagctacgcactgctggtggccgagtcgtggcgggagacggtgcagctgtacgaggacgaggtgcgcgagctggaggaggcgctgcggcgcggccaggagagcagactccaggcggaggaagagacgcggctgtgcgcgcaggaggcagaggcgctgcggcgcgaggcgctcgggttggagcagctgcgcgcgcggctggaggacgcgctgctgcggatgcgcgaggagtacgggatacaggccgaggagcggcagagagcgattgactgcctggaggatgagaaggcaaccctcaccttggccatggctgactggctgcgggactatcaggacctcctgcaggtgaagaccggcctcagtctggaggtggcgacctaccgggccttattggaaggagaaagtaatccagagatagtgatctgggctgagcacgttgaaaacatgccgtcagaattcagaaacaaatcctatcactataccgactcactactacagagggaaaatgaatggaatctattttcaaggcagaaagcacctttggcaagtttcaatcacagctcggcactgtattctaacctgtcagggcaccgtggatctcagacgggcacatctattggaggtgatgccagaagaggcttcttgggctcgggatattcttcctcggccactacccagcaggaaaactcatacggaaaagccgtcagcagtcaaaccaacgtcagaactttctctccaacctatggccttttaagaaatactgaggctcaagtgaaaacattccctgacagaccaaaagccggagatacaagggaggtccccgtttacataagtgaagattccacaattgcccgcgagtcgtaccgggatcgccgagacaaggtggcagcaggtgcttcggaaagcacacggtcaaatgagaggaccgtcattctgggaaagaaaacagaagtgaaagccacgagggagcaagaaagaaacagaccagaaaccatccgaacaaagccagaagagaaaatgttcgattctaaagagaaggcttctgaggagagaaacctaagatgggaagaattgacaaagttagataaggaagcgagacagagagaaagccagcagatgaaggagaaggctaaggagaaggactcaccgaaggagaagagtgtgcgagagagagaggtgccgattagtctagaagtatcccaggacagaagagcagaggtgtccccgaaaggtttgcagacgcctgtgaaggatgctggtggtgggaccggtagagaggcagaagcaagagagctacggttcaggttgggcaccagtgatgccactggttctctgcaaggcgattccatgacagaaaccgtagcagaaaacatcgttaccagtatcctgaagcagttcactcagtctccagagacagaagcatctgctgattcttttccagacacaaaagtcacttacgtggacaggaaagagcttcctggggaaaggaaaacaaagactgaaatagttgtggagtctaaactgactgaggatgttgatgtttccgatgaagctggcctggactaccttttaagcaaggatattaaggaagtggggctgaaaggcaagtcagccgagcagatgataggagacatcatcaacctcggcctgaaagggagggaggggagagcaaaggtcgtcaacgtggagatcgtggaggagcccgtgagttatgtcagcggggagaagccggaggagttttccgtcccattcaaagtggaggaggtcgaagatgtgtcgccaggcccctgggggttggttaaggaggaggaaggttatggagaaagcgatgtcacattctcagttaatcagcatcgaaggaccaagcagccccaggagaacacgactcacgtggaagaagtgacagaggcaggtgattcagagggcgagcagagttattttgtgtccactccagatgaacaccccggggggcacgacagagatgacggctcggtgtacgggcagatccacatcgaggaggaatccaccatcaggtactcttggcaggatgaaatcgtgcaggggactcgaaggaggacacagaaggacggtgcagtgggcgagaaggttgtgaagcccttggatgtcccagcgccctctctggagggggacctgggttccactcactggaaagaacaagctagaagcggtgaatttcatgccgaacccacagtcattgaaaaagaaattaaaataccccacgaattccacacctccatgaagggcatctcctccaaggagccccggcagcagctggtggaggtcatcgggcagctggaggaaacccttcccgagcgcatgagggaggagctgtccgccctcaccagagaggggcagggtgggccggggagcgtttccgtggatgtcaagaaggtccagggtgctggtggcagttccgtgaccctggttgctgaagtcaacgtctcacaaactgtggatgccgatcggttagacctggaggagctgagcaaagatgaggccagtgagatggagaaggctgtggagtcggtggttcgggagagcctgagcaggcaacgcagcccagcgcctggcagcccagatgaggaaggtggagcggaggccccggctgctggcattcgcttcaggcgttgggccacccgggagctgtacatcccttcaggcgagagcgaggttgctggtggggcctctcacagctcgggacagcgcactccccagggcccagtgtcggccactgtggaggtcagcagccccacaggctttgcccagtcacaggtgctggaggatgtgagccaggctgcaaggcacataaaactcggcccctctgaagtctggaggactgagcgaatgtcatatgaaggacccactgcagaagtggtggaggtaagtgcgggaggtgacctaagtcaggcagcgagcccgaccggagccagccggtctgtgaggcatgtcacgctgggtcccggtcaaagtccactgtccagagaagtcatcttcctaggccctgcccctgcctgtccagaggcatggggctcgccagaacctggcccagcagagtcttctgcagatatggacggatcagggaggcacagcacatttggctgcagacaatttcatgctgaaaaggagattatttttcagggccccatttctgctgcagggaaggttggtgattattttgcaacagaagagtcagtgggtacccagacttctgtcaggcaactccagttaggccctaaagaagggttcagtgggcaaatccagttcacagctccactttcagacaaggtggagttgggtgtcataggagattctgtacacatggaagggttgccagggagcagcacatccatcaggcacatcagcattgggcctcagaggcatcagaccacccagcagatagtttaccatgggctggttccccaactgggggaatctggtgactcagagagcactgtgcacggagagggctcagcagatgtgcaccaggccactcacagtcatacctcgggtagacaaaccgttatgactgaaaagagcaccttccaaagtgtcgtttctgaatctccccaggaggatagtgcaggggacacatcaggggcagaaatgacatcgggtgttagcagatcctttaggcacattcgactaggtcctacagaaacggaaacctctgaacacattgccatccgtggacccgtgtccagaacatttgtgcttgctggttcagcggactcccctgagctaggcaagttagcagacagcagcagaacgctaaggcacattgcaccagggcccaaagaaacttcgtttacctttcagatggatgtgagtaacgtagaggcgatccgcagccggacacaggaagcgggagctctcggtgtgtctgaccgtggttcctggagagacgcggacagtaggaatgaccaggcagttggtgtgagctttaaggcctctgctggggaaggagaccaggcccacagagaacagggcaaggagcaggccatgtttgataagaaggtgcagctccagagaatggtagaccaaaggtcggtgatttcagatgaaaagaaagttgccctcctctatctagacaatgaggaggaggagaatgatgggcattggttttaataagcagaaacattttgttttaatggcagcctgttggcgacgtgccaacatccaaaggccttaacttattttaagaggccgagggagtctatgaaaatctccccttttttacttttttaaagagtactcccggcatggtcaatttcctttatagttaatccgtaaaggtttccagttaattcatgccttaaaaggcactgcaattttatttttgagttgggacttttacaaaacacttttttccctggagtcttctctccacttctggagatgaatttctatgttttgcacctggtcacagacatggcttgcatctgtttgaaactacaattaattatagatgtcaaaacattaaccagattaaagtaatatatttaagagtaaattttgcttgcatgtgctaatatgaaataacagactaacattttaggggaaaaataaatacaatttagactctaaaaagtcttttcaaaaagaaatgggaaataggcagactgtttatgttaaaaaaattcttgctaaatgatttcatctttaggaaaaaattacttgccatatagagctaaattcatcttaagacttgaatgaattgctttctatgtacagaactttaaacaatatagtatttatggcgaggacagctgtagtctgttgtgatatttcacattctatttgcacaggttccctggcactggtagggtagatgattattgggaatcgcttacagtaccatttcattttttggcactaggtcattaagtagcacacagtctgaatgcccttttctggagtggccagttcctatcagactgtgcagacttgcgcttctctgcaccttatcccttagcacccaaacatttaatttcactggtgggaggtagaccttgaagacaatgaagagaatgccgatactcagactgcagctggaccggcaagctggctgtgtacaggaaaattggaagcacacagtggactgtgcctcttaaagatgcctttcccaaccctccattcatgggatgcaggtctttctgagctcaagggtgaaagatgaatacaataacaaccatgaacccacctcacggaagctttttttgcactttgaacagaagtcattgcagttggggtgttttgtccagggaaacagtttattaaatagaaggatgttttggggaaggaactggatatctctcctgcagcccagcaccgagatacccaggacgggcctggggggcgagaaaggcccccatgctcatgggccgcggagtgtggacctgtagataggcaccaccgagtttaagatactgggatgagcatgcttcattggattcattttattttacacgtcagtattgttttaaagtttctgtctgtaaagtgtagcatcatatataaaaagagtttcgctagcagcgcattttttttagttcaggctagcttctttcacataatgctgtctcagctgtatttccagtaacacagcatcatcacactgactgtggcgcactggggaataacagtctgagctagcaccaccctcagccaggctacaacgacagcactggagggtcttccctctcagattcacctggaggccctcagacccccagggtgcacgtctccccaggtcctgggagtggctaccgcaggtagtttctggagagcacgttttcttcattgataagtggaggagaaatgcagcacagctttcaagatactattttaaaaacaccatgaatcagatagggaaagaaagttgattggaatggcaagtttaaacctttgttgtccatctgccaaatgaactagtgattgtcagactggtatggaggtgactgctttgtaaggttttgtcgtttctaatacagacagagatgtgctgattttgttttagctgtaacaggtaatggtttttggatagatgattgactggtgagaatttggtcaaggtgacagcctcctgtctgatgacaggacagactggtggtgaggagtctaagtgggctcagtttgatgtcagtgtctgggctcatgacttgtaaatggaagctgatgtgaacaggtaattaatattatgacccacttctatttactttgggaaatatcttggatcttaattatcatctgcaagtttcaagaagtattctgccaaaagtatttacaagtatggactcatgagctattgttggttgctaaatgtgaatcacgcgggagtgagtgtgcccttcacactgtgacattgtgacattgtgacaagctccatgtcctttaaaatcagtcactctgcacacaagagaaatcaacttcgtggttggatggggccggaacacaaccagtctttttgtatttattgttactgagacaaaacagtactcactgagtgtttttcagtttcctactggtggttttgatattgtttgtttaagatgtatatttagaatgacatcatctaagaagctgattttgctaaactcctgttccctacaatgggaaatgtcacaagaatgtgcaaaaataaaaatctgagg

SEQ ID NO: 201 - protein, 1212 aa, Homo sapiens
LPNPPPEEISTGTQSTFSTMGTVSRRRICRTNTMARAKILQDIDRELDLVERESAKLRKKQAELDEEEKEIDAKLRYLEMGINRRKEALLKEREKRERAYLQGVAEDRDYMSDSEVSSTRPTRIESQHGIERPRTAPQTEFSQFIPPQTQTESQLVPPTSPYTQYQYSSPALPTQAPTSYTQQSHFEQQTLYHQQVSPYQTQPTFQAVATMSFTPQVQPTPTPQPSYQLPSQMMVIQQKPRQTTLYLEPKITSNYEVIRNQPLMIAPVSTDNTFAVSHLGSKYNSLDLRIGLEERSSMASSPISSISADSFYADIDHHTPRNYVLIDDIGEITKGTAALSTAFSLHEKDLSKTDRLLRTTETRRSQEVTDFLAPLQSSSRLHSYVKAEEDPMEDPYELKLLKHQIKQEFRRGTESLDHLAGLSHYYHADTSYRHFPKSEKYSISRLTLEKQAAKQLPAAILYQKQSKHKKSLIDPKMSKFSPIQESRDLEPDYSSYMTSSTSSIGGISSRARLLQDDITFGLRKNITDQQKFMGSSLGTGLGTLGNTIRSALQDEADKPYSSGSRSRPSSRPSSVYGLDLSIKRDSSSSSLRLKAQEAEALDVSFSHASSSARTKPTSLPISQSRGRIPIVAQNSEEESPLSPVGQPMGMARAAAGPLPPISADTRDQFGSSHSLPEVQQHMREESRTRGYDRDIAFIMDDFQHAMSDSEAYHLRREETDWFDKPRESRLENGHGLDRKLPERLVHSRPLSQHQEQIIQMNGKTMHYIFPHARIKITRDSKDHTVSGNGLGIRIVGGKEIPGHSGEIGAYIAKILPGGSAEQTGKLMEGMQVLEWNGIPLTSKTYEEVQSIISQQSGEAEICVRLDLNMLSDSENSQHLELHEPPKAVDKAKSPGVDPKQLAAELQKVSLQQSPLVLSSVVEKGSHVHSGPTSAGSSSVPSPGQPGSPSVSKKKHGSSKPTDGTKVVSHPITGEIQLQINYDLGNLIIHILQARNLVPRDNNGYSDPFVKVYLLPGRGQVMVVQNASAEYKRRTKHVQKSLNPEWNQTVIYKSISMEQLKKKTLEVTVWDYDRFSSNDFLGEVLIDLSSTSHLDNTPRWYPLKEQTESIDHGKSHSSQSSQQSPKPSVIKSRSHGIFPDPSKDMQVPTIEKSHSSPGSSKSSSEGHLRSHGPSRSQSKTSVTQTHLEDAGAAIAAAEAAVQQLRIQPSKRRK

SEQ ID NO: 202 - DNA, 5639 bp, Homo sapiens
ctctgccaaatccacctcctgaggagatttccacaggaactcaatccacattcagcacaatgggcacagtttccaggagaaggatctgcagaaccaacacaatggcacgagccaagattctccaggacatagacagagagcttgatcttgtggaaagggagtctgcaaaacttcgaaagaaacaagcagagcttgatgaagaagaaaaggagattgatgctaagctacgatacctggaaatgggaattaacaggaggaaagaggccctattaaaggagagagaaaagagagaacgagcctacctccagggagtagctgaggatcgtgattacatgtctgacagtgaagtgagtagcacaagaccaacccgaatagaaagtcagcatggcattgagcgaccaagaactgctccccaaactgaattcagccagtttataccaccacaaacccaaacagaatctcaactagttcctccgacaagtccttacacacaataccagtactcttcccctgctcttcctacccaagcacccacctcatacactcaacagtctcattttgagcaacaaactttgtaccatcagcaagtttcaccttatcagactcagccaacattccaagctgtggcaacaatgtccttcacacctcaagttcaacctacaccaaccccacagccttcttatcagttaccttcacagatgatggtgatacaacagaagccacggcaaactacattatatttggagcccaagataacctcaaactatgaagtgattcgcaaccaaccccttatgatagcacctgtttctacggataacacatttgctgtttcccatcttggtagtaagtacaatagtttagacttgagaataggtttggaggaaagaagtagcatggcaagcagtccaatatcaagcatatctgcagattctttctatgcagatattgatcaccatactccacgaaattatgtcctaattgacgacattggagagatcaccaaaggaacagcggcattaagcaccgcatttagccttcatgaaaaggatctgtcaaaaacagaccgtctccttcgaaccactgagacacgccggtctcaagaagtgacagatttcctagcacctttacagtcttcctctagattgcatagttatgtgaaggcggaggaagacccaatggaggatccttacgagttaaagcttctgaaacatcagattaaacaggaatttcgtagagggacagagagcttagatcaccttgctggtctttctcattattaccatgctgatactagctacagacattttccaaaatctgagaagtatagcatcagtagactcacacttgaaaaacaagcagcaaaacaactgccagcagccatactttatcaaaagcagtcaaagcataagaaatcactaattgaccctaaaatgtcaaaattttcacctattcaagaaagtagagaccttgaacctgattattcaagctatatgacttctagcacttcatctattggtggcatttcctccagggcaaggctccttcaagatgacatcacttttggcctcagaaaaaatattacagaccaacaaaaatttatgggatcttctcttggcacaggactgggcacattaggaaataccatacgctcagctctgcaggatgaagcggataagccatacagtagtggcagcaggtccagaccttcctccagaccttcctctgtctatgggcttgatttatcaattaaaagggattcttctagctcttccctaagactgaaagctcaagaggctgaagctctagatgtttcctttagtcatgcatcatcctctgccagaactaagccgaccagtttgccaattagtcaaagtagaggaagaataccaattgtggcccagaattctgaagaagaaagcccactcagtcctgttggccagccaatgggaatggccagggctgcagctggacccctgccaccaatatctgcagacaccagggatcagtttggatcaagccactcattgcctgaagttcagcaacacatgagggaagaatcacggactcgaggctatgaccgtgacatagcattcatcatggatgacttccaacatgccatgtcagacagtgaagcctatcatctgcgtcgtgaggaaacagattggtttgataaacccagggagtctcgtttggaaaatggacatggtctggaccgaaaactgccggaaagattggtccactctagaccactcagtcaacatcaagagcaaattatacagatgaacgggaaaactatgcactacatctttcctcacgcaaggataaaaataacaagagactcaaaggatcacacagtttcaggtaatggattaggaattagaattgtgggtggtaaagaaatcccgggacatagtggagaaattggagcctatattgccaagattcttcctgggggaagtgcggaacagacggggaagcttatggaagggatgcaagtattggaatggaatggaattcccttgacttctaaaacatatgaagaagttcagagtatcattagtcagcaaagtggggaagcagaaatatgtgtaagactggacctcaatatgctatcagattctgaaaattcccagcatctggaacttcatgagccaccaaaagctgtggataaggcgaaatccccaggggttgatcctaagcagttggcagcagaactccagaaggtttcactacagcagtcaccgctggttctgtcatcagttgttgaaaaaggatctcatgttcattcaggtcctacatcagcaggatccagttccgttcccagccctgggcaaccagggtccccctcagtgagcaaaaagaagcacggcagcagcaagcctaccgatggaacaaaggttgtctctcatccaattacaggagaaattcagcttcaaattaactatgatcttggaaatctcataatacatattctccaagcaagaaatcttgttcctcgagacaacaatggttattctgacccttttgtgaaagtgtaccttcttccagggagaggtcaagtcatggttgtccagaatgcaagtgctgagtacaagagaaggactaaacatgtccagaaaagtcttaatcctgagtggaatcaaacagtaatttataaaagtatttccatggaacagctcaagaagaaaacactggaggtgacagtttgggattatgatagattttcatccaacgacttccttggggaggtattgattgatttatctagcacatctcacctcgataacactccaaggtggtatcctctcaaagaacagactgaaagcattgatcatggcaagtctcattccagtcagagcagccagcagtccccaaagccatctgttatcaaaagcagaagccatggtatcttccctgacccatcaaaggacatgcaggttcccaccattgagaaatcccatagtagtcctggtagctcaaaatcatcatcagaaggccatctccgttctcatggaccatctcgcagtcaaagcaaaaccagcgtcactcagacccacctggaagatgcaggggctgccatagctgctgccgaagctgccgtgcaacaactccgcattcaaccaagtaaaagacgcaaataaattcctcagcatggcagcttaatgttcatctgttgcctttctttcctgctgtcctttcctgtttgctttcagttttcaacatcctctgctcaccctgttctctgtccctttgtctgtgtaagaacgatataaatacattaatatgctctttcttatttagattttttttatttacatagactgaaataaaactggctgtttctcctttgtttccaccatccatccaacctggctcatagcatttgatacagtgtctgtgatgtttggaagcaaagcaatgttgtgtgtcctttttgtttgcgcttaaatatcttttagaatacagaaattataagcacaagtggctgccagttttccaggacttataccaaaaaaaaaaaagtgcacacatataagtatttagagcagatttgcaattagattcttgtatctgaaaacactcaaaaagtctaggcagaagataatgcaaccaacagtcaacttctagaaccttggaggaaaagccatttcaagacagtgctttaaaacactaacaaattttgcttctgaaatatggtagctttccatgtgcaaaaaattgtagtcttctgaaaaatctgtgaagaaaatcttatttcttacattctcaaaaaactacattaaattaatatatgtataagcatatgtgataaggcaatgcaacctcactgaggagcacaattgggtccattctgttggatcacactttgtatgtgatgacagattttacagatattttttctaaccattggaaatcaagatatactatgtctggtagctataagtcaatcaaattataacaattgacctatcttaactgctgtattttcatttcatttgtgaaaatttagtcgattgatataattatataaaaacttaatatgtgcaaatatttcacaaatgtaggtaccctgttacttctaaaaggcattagccaggcaatggagatagatcattgttctctccatctccctagtcatcattttcaaagaaacagccagttttaaacccctttagtgctgtgcatgtggtgtcattttggcatttgaaaacacaacctatttaaatagagcaaaagagcacttctgtttgcatgaataacatttaagctggttccatctgaggatacatactctgggtttccatttcacccacactgccacagcagcacataaaagcggtcagtctaatcatgccaggaagcagcacagacacagcatagcaggagtcctccccattcaaagaactcagtctgataatctgcctccaccagccaatggcaaccaagaccaaagccagctagccctcaggaaggtgatgtctgatggaccagtcaagccagaaggaggtgagcagaaaggccctgttcaaagcacacagcaagaacatccccaaatttaaagctctcatctttaatttttagagattgtctgataaaatatgtttatccactttttaatgtgcttttgtgggcatggcatttcaggacttcatcatcaccatgtaagtcccaagatcagtcccgtaatatattgactacagtgatttgtatttttctatgcactgggcatcttttgacttttgttgggaaatagattaacaatattcatattgcagaatggaatgcatgctactaacctaatctgttcaagcatgactataaatatgtttcattgtgataaaagtttaaattgctcacagttcaagttagcctaccagttggaatgtggatcagtgttttttgcctattatttcaagtgtaacttttaaaaatttagtggattttgaaaattcttagaggaaagtaaaggaaaaattgttaatgcactcatttacctttacatggtgaaagttctctcttgatcctacaaacagacattttccactcgtgtttccatagttgttaagtgtatcagatgtgttgggcatgtgaatctccaagtgcctgtgtaataaataaagtatctttatttcattcat

SEQ ID NO: 203 - protein, 403 aa, Homo sapiens
MFVASERKMRAHQVLTFLLLFVITSVASENASTSRGCGLDLLPQYVSLCDLDAIWGIVVEAVAGAGALITLLLMLILLVRLPFIKEKEKKSPVGLHFLFLLGTLGLFGLTFAFIIQEDETICSVRRFLWGVLFALCFSCLLSQAWRVRRLVRHGTGPAGWQLVGLALCLMLVQVIIAVEWLVLTVLRDTRPACAYEPMDFVMALIYDMVLLVVTLGLALFTLCGKFKRWKLNGAFLLITAFLSVLIWVAWMTMYLFGNVKLQQGDAWNDPTLAITLAASGWVFVIFHAIPEIHCTLLPALQENTPNYFDTSQPRMRETAFEEDVQLPRAYMENKAFSMDEHNAALRTAGFPNGSLGKRPSGSLGKRPSAPFRSNVYQPTEMAVVLNGGTIPTAPPSHTGRHLW

SEQ ID NO: 204 - DNA, 2870 bp, Homo sapiens
aggtcgcaggcgggcgtgcgtggagcgggggccgcggccgcgccgcagagatgtgactcgggccgaaggccagctggagcgtcggcgctgcggggccgcgggggtcgaatgttcgtggcatcagagagaaagatgagagctcaccaggtgctcaccttcctcctgctcttcgtgatcacctcggtggcctctgaaaacgccagcacatcccgaggctgtgggctggacctcctccctcagtacgtgtccctgtgcgacctggacgccatctggggcattgtggtggaggcggtggccggggcgggcgccctgatcacactgctcctgatgctcatcctcctggtgcggctgcccttcatcaaggagaaggagaagaagagccctgtgggcctccactttctgttcctcctggggaccctgggcctctttgggctgacgtttgccttcatcatccaggaggacgagaccatctgctctgtccgccgcttcctctggggcgtcctctttgcgctctgcttctcctgcctgctgagccaggcatggcgcgtgcggaggctggtgcggcatggcacgggccccgcgggctggcagctggtgggcctggcgctgtgcctgatgctggtgcaagtcatcatcgctgtggagtggctggtgctcaccgtgctgcgtgacacaaggccagcctgcgcctacgagcccatggactttgtgatggccctcatctacgacatggtactgcttgtggtcaccctggggctggccctcttcactctgtgcggcaagttcaagaggtggaagctgaacggggccttcctcctcatcacagccttcctctctgtgctcatctgggtggcctggatgaccatgtacctcttcggcaatgtcaagctgcagcagggggatgcctggaacgaccccaccttggccatcacgctggcggccagcggctgggtcttcgtcatcttccacgccatccctgagatccactgcacccttctgccagccctgcaggagaacacgcccaactacttcgacacgtcgcagcccaggatgcgggagacggccttcgaggaggacgtgcagctgccgcgggcctatatggagaacaaggccttctccatggatgaacacaatgcagctctccgaacagcaggatttcccaacggcagcttgggaaaaagacccagtggcagcttggggaaaagacccagcgctccgtttagaagcaacgtgtatcagccaactgagatggccgtcgtgctcaacggtgggaccatcccaactgctccgccaagtcacacaggaagacacctttggtgaaagactttaagttccagagaatcagaatttctcttaccgatttgcctccctggctgtgtctttcttgagggagaaatcggtaacagttgccgaaccaggccgcctcacagccaggaaatttggaaatcctagccaaggggatttcgtgtaaatgtgaacactgacgaactgaaaagctaacaccgactgcccgcccctcccctgccacacacacagacacgtaataccagaccaacctcaatccccgcaaactaaagcaaagctaattgcaaatagtattaggctcactggaaaatgtggctgggaagactgtttcatcctctgggggtagaacagaaccaaattcacagctggtgggccagactggtgttggttggaggtggggggctcccactcttatcacctctccccagcaagtgctggaccccaggtagcctcttggagatgaccgttgcgttgaggacaaatggggactttgccaccggcttgcctggtggtttgcacatttcaggggggtcaggagagttaaggaggttgtgggtgggattccaaggtgaggcccaactgaatcgtggggtgagctttatagccagtagaggtggagggaccctggcatgtgccaaagaagaggccctctgggtgatgaagtgaccatcacatttggaaagtgatcaaccactgttccttctatggggctcttgctctaatgtctatggtgagaacacaggccccgccccttcccttgtagagccatagaaatattctggcttggggcagcagtcccttcttcccttgatcatctcgccctgttcctacacttacgggtgtatctccaaatcctctcccaattttattcccttattcatttcaagagctccaatggggtctccagctgaaagcccctccgggaggcaggttggaaggcaggcaccacggcaggttttccgcgatgatgtcacctagcagggcttcaggggttcccactaggatgcagagatgacctctcgctgcctcacaagcagtgacacctcgggtcctttccgttgctatggtgaaaattcctggatggaatggatcacatgagggtttcttgttgcttttggagggtgtgggggatattttgttttggtttttctgcaggttccatgaaaacagcccttttccaagcccattgtttctgtcatggtttccatctgtcctgagcaagtcattcctttgttatttagcatttcgaacatctcggccattcaaagcccccatgttctctgcactgtttggccagcataacctctagcatcgattcaaagcagagttttaacctgacggcatggaatgtataaatgagggtgggtccttctgcagatactctaatcactacattgctttttctataaaactacccataagcctttaacctttaaagaaaaatgaaaaaggttagtgtttgggggccgggggaggactgaccgcttcataagccagtacgtctgagctgagtatgtttcaataaaccttttgatatttctcaaaaaaaaaaaaaaaaaaaaaaa

SEQ ID NO: 205 - protein, 332 aa, Homo sapiens
MTMETVESQHDGSITASLTESKSAHVQTQTGQISIPALAQCSELRSGTRRGSPAVTLVQLPSGQTIHVQGVIQTPQPWVIQSSEIHTVQVAAIAETDESAESEGVIDSHKRREILSRRPSYRKILNELSSDVPGVPKIEEERSEEEGTPPSIATMAVPTSIYQTSTGQYIAIAQGGTIQISNPGSDGVQGLQALTMTNSGAPPPGATIVQYAAQSADGTQQFFVPGSQVVVQAATGDMPTYQIRAPTAALPQGVVMAASPGSLHSPQQLAEEATRKRELRLMKNREAARECRRKKKEYVKCLENRVAVLENQNKTLIEELKALKDLYCHKVE

SEQ ID NO: 206 - DNA, 1431 bp, Homo sapiens
atgaccatggaaacagttgaatcccagcatgatggaagtataacagcttctttgacagagagcaagtctgctcatgtgcagactcagactgggcaaatttcaatccctgctttagctcagtgcagtgagctgagatcaggcaccagaagaggctccccagctgtaactctagtgcagttaccttcgggccaaactatacatgtccagggagtaattcagacaccacagccatgggttattcagtcatcagaaatacacaccgttcaggtagcagcaattgcagagacagatgaatctgcagaatcagaaggtgtaattgattctcataaacgtagagaaatcctttcacgaagaccctcttataggaaaatactgaatgaactgtcctctgatgtgcctggtgttcccaagattgaagaagagagatcagaggaagaaggaacaccacctagtattgctaccatggcagtaccaactagcatatatcagactagcacggggcaatacattgctatagcccaaggtggaacaatccagatttctaacccaggatctgatggtgttcagggactgcaggcattaacaatgacaaattcaggagctcctccaccaggtgctacaattgtacagtacgcagcacaatcagctgatggcacacagcagttctttgtcccaggcagccaggttgttgttcaagctgccactggtgacatgccaacttaccagatccgagctcctactgctgctttgccacagggagtggtgatggctgcatcgcccggaagtttgcacagtccccagcagctggcagaagaagcaacacgcaaacgagagctgaggctaatgaaaaacagagaagctgcccgggagtgtcgcaggaagaagaaagaatatgtcaaatgtcttgaaaatcgtgtggctgtgcttgaaaaccaaaacaagactctcattgaggaactcaaggccctcaaagatctttattgccataaagtagagtaactgtctttgacttggaccttgtttactctaatcaaggcaggagatgcagcagtcctacttattgccatgtggacttgtgggaaggacacgtgtgacccttaagaatccagtttggattagtgtttgaaattgaattgggaatgttgttccaggatgtggaatgcagcgtgatcacacttaccgagcttactttgatctgtttgtcaatagcatgcaaaaaatgctttgtttgccctttgcttctgctttttttcagggaagctgccaaagaatgtcgacgtcgaaagaaagaatatgtaaaatgcctggagagccgagttgcagtgctggaagtccagaacaagaagcttatagaggaacttgaaaccttgaaagacatttgttctcccaaaactgattactagaaatatttaactatgaactgattacaga

SEQ ID NO: 207 - protein, 201 aa, Homo sapiens
MVSWIISRLVVLIFGTLYPAYYSYKAVKSKDIKEYVKWMMYWIIFALFTTAETFTDIFLCWFPFYYELKIAFVAWLLSPYTKGSSLLYRKFVHPTLSSKEKEIDDCLVQAKDRSYDALVHFGKRGLNVAATAAVMAASKGQGALSERLRSFSMQDLTTIRGDGAPAPSGPPPPGSGRASGKHGQPKMSRSASESASSSGTA

SEQ ID NO: 208 - DNA, 3856 bp, Homo sapiens
aacgccgggcagggcggcgggcgcgctcagtctggcggcggctgccgtgagctgactgacgttccgggaacgccgcagcagcccgcgccgcccgcagcctagccgagccgcgccgcccgggcctcgcccgcccgcctgcccgccatggtgtcatggatcatctccaggctggtggtgcttatatttggcaccctttaccctgcgtattattcctacaaggctgtgaaatcaaaggacattaaggaatatgtcaaatggatgatgtactggattatatttgcacttttcaccacagcagagacattcacagacatcttcctttgttggtttccattctattatgaactaaaaatagcatttgtagcctggctgctgtctccctacacaaaaggctccagcctcctgtacaggaagtttgtacatcccacactatcttcaaaagaaaaggaaatcgatgattgtctggtccaagcaaaagaccgaagttacgatgcccttgtgcacttcgggaagcggggcttgaacgtggccgccacagcggctgtgatggctgcttccaagggacagggtgccttatcggagagactgcggagcttcagcatgcaggacctcaccaccatcaggggagacggcgcccctgctccctcgggccccccaccaccggggtctgggcgggccagcggcaaacacggccagcctaagatgtccaggagtgcttctgagagcgctagcagctcaggcaccgcctagaatccttcgatctcgcttcaggaagaaaagtacctcatcctcggccaccgaaaccacgtgagtgagatgagccaacagcaccggatccacagaatgtttcttctctgccttaaagagctattcactaataacatagaaatccgcaagctgggtgtgctttgagtgtgcagcctcacaaacatggccttttctctctccccttccacttttaaggatttatttttttcccccttttctttattttgctggggagaggctaaagggaaaggtagtaggggcgggggtggtgacctttaagtcttctgaggttggtaattttccacaattggattgtcattatagacagcagtgtgttttttagaaagataagagaatcacccctatgctgctgagatgtacatttgtaatttatctgttgcatacttagtttttagtcctgtaaatgcaaacacagcattttttacaactttctttgttcttggtacttatactttgaactatgatgtacatatttatggcttttggcttttaatataatggacttgcaagggctgccagaggttctgatatgtaagaaaactgcaaaaacaaatatagacaaatattttgattctagagaacgtctcagatgtgcttataaagcttccaaatacaactccagtaagacatccctttccctgcaggagtgtggtctatattctttagatagttgtttagtcaaaagaccagacaagttacaaactaagagaaacaatatttcacaacacagtaaagtgtgatgagaggtcaggggaacatcccagtaaaagagaagagtcacaggaagctcatctcctccctggattctggattaggagcttctgaatcttttccagggataggcaggtagctcactcttggtgcaatttcttgaggatgggaacatgtagagctgctggaaggagtaattctgtgcttgacaaaggacgatttctcctttatcgtgaccagtgctgccgatttcctgacagaggagcttacactctgagcaccttgttttagcgaactctagcaaaacttgtttagcttagcaaaaacaaacacacaaaaaactgagaactctgctgtttcagatatgccataacatacatctgaaacacatgtgtaacaatcaaaatggtgggctctagaatggttttggagctcgagatcttcatgggttagacttgctggtcagacccaggagcacctgtggctcacaccttctgttcccctcctggcctgtgcagaatgtaaacagcagactcatactcaatgggcactacaggccttatcagacgttttatacaagcctggattgcttagtaggggaataaggcattctctgagggggctttccacttagattgagaattttatttgaaaagaatctggtttaaatggcattgtggtccgaggtagctgctctccccactgagagctgagccgaaatataagaataatatatttgtgcttcgagttggtgtttctttcagtgtaatgcatgcagtggtcacaacccagttactcataatatttggattgtatttgttcgtagatatgcccagaagactagagaattagtgttatataccatatagaacttactgtcagtcaactataaacaggcccaattaaaaactgttccattactacgcaaacacatattagaggcctttgctgatgacacattagctggatcttagccaccccagaaagggtttgatttgaagctgattgttgccagatatgcatattggaatcccatctacccatagttcctctgaaggtgattttgtaatttgcaaaagggtataggaaaatatacctaaaagcgaatttgtggctgagaggataaacagaagctgtttgctcatgttctgtgccccacacccaccaatacctaaatctgttaaggaagacagaaaatgttttctttgtgctcattgagtagttccagacagaagaagaatatactctttaaaatgtatttacctgttagttggaagtacccagaattatcagaaacgaatgcaaaaaaaaaaaaaaaaaaaaaaagcttacacagcttcttagcaattttttttttttttgccgaaacaataaattgcctttagcagcagtttaaaatcctatcgtgaacaacctatattttcgccattttacaatggagagttgtgacaagtacaggttatcaagtttgcacttaactatgccaaaaaaagtttgaagcgctctattctcagacatgctgtattattacttctcattcaagattgaaaaatataaaggtatccaaactctgtcttaatgtaaatgtaactatttttccttcaagtgttgactagggagtcggtttctctcttaaagacactcactgtacaactgaaagcagctgtcatatttctggcaaaatgtgtttacgtatctgacaagttgtacatttgtgtatgaactgacataaaatgtgaaagcctgtaagtgtacatgtagtggtgtggtgttctgtctagaggatacaactgaatgtttttaatttgctgacttacagacacaggctgtttacaaaatgctagctggaaagtctgtaatgttcatgtcataacttttagttaattgccattgagcacctgttctgaggaggtgagatgtggacttgtgcttataaactggagagtttagtcataatccctcctggctttgtgtgaatagcttgctcactttgctggcctttgaaatgtgttctccgtgataagctatccatgtgtttgtgataagagtgcttgtcaaccatgaccatctttgagccttcctagtcctccacctggcacagtatttgaaatggcaaaggatgtgcttcatcctctaacaaacagtgtacactcccagagctgatattctggattgtgactgtgcacatttcctctagttcatgtctgtagtccctatagaatgatctgtaataaaatagtatactggactgtgcatcaaagggatgtaaaattacagtattccaaaggttgaagttctgctgttttgttataatgcctgatacacatcttgaataaagtcttaacatttttctttt

SEQ ID NO: 209 - protein, 288 aa, Homo sapiens
MKPSGEDQAALAAGPWEECFQAAVQLALRAGQIIRKALTEEKRVSTKTSAADLVTETDHLVEDLIISELRERFPSHRFIAEEAAASGAKCVLTHSPTWIIDPIDGTCNFVHRFPTVAVSIGFAVRQELEFGVIYHCTEERLYTGRRGRGAFCNGQRLRVSGETDLSKALVLTEIGPKRDPATLKLFLSNMERLLHAKAHGVRVIGSSTLALCHLASGAADAYYQFGLHCWDLAAATVIIREAGGIVIDTSGGPLDLMACRVVAASTREMAMLIAQALQTINYGRDDEK

SEQ ID NO: 210 - DNA, 1500 bp, Homo sapiens
cggagggtggggagcggaaagcaggacgcacggctcccgcggcccgctggctgcccttcccgccagcgcaggtgtgggacgggcggcggactaggcacagagctgcgggagcaggcacagggagtgtggagcctggcggcgggacggcgggatccggtgggagccggagtcccgccgaggggggctggaggtggaggggcccggcgaggccgcgatgaagccgagcggcgaggaccaggcggcgctggcggccggcccctgggaggagtgcttccaggcggccgtgcagctggcgctgcgggcaggacagatcatcagaaaagcccttactgaggaaaaacgtgtctcaacaaaaacatcagctgcagatcttgtgacagaaacagatcaccttgtggaagatttaattatttctgagttgcgagagaggtttccttcacacaggttcattgcagaagaggccgcggcttctggggccaagtgtgtgctcacccacagcccgacgtggatcatcgaccccatcgacggcacctgcaattttgtgcacagattcccgactgtggcggttagcattggatttgctgttcgacaagagcttgaattcggagtgatttaccactgcacagaggagcggctgtacacgggccggcggggtcggggcgccttctgcaatggccagcggctccgggtctccggggagacagatctctcaaaggccttggttctgacagaaattggccccaaacgtgaccctgcgaccctgaagctgttcctgagtaacatggagcggctgctgcatgccaaggcgcatggggtccgagtgattggaagctccacattggcactctgccacctggcctcaggggccgcggatgcctattaccagtttggcctgcactgctgggatctggcggctgccacagtcatcatcagagaagcaggcggcatcgtgatagacacttcgggtggacccctcgacctcatggcttgcagagtggttgcggccagcacccgggagatggcgatgctcatagctcaggccttacagacgattaactatgggcgggatgatgagaagtgactgcggctgaggcaaagctgctcccaaggcctccctgggctgctgtgggctcctggggaggtggccctcgtggcccacgctccatgccagtggctcacgctctgctcctggctaccccagagggagttgtcacgctacagtgagtggctggccttttaaatcgacgtctctctcaccaggatttggtgtttagctgtttctctctttaatctcacgtagcctttttcaggttagtacgtgttcttctgtcagggccaaaactcaaatctcctgtgaaatacgtattgataatccaatcttgatttttccccccagaatataaatctcaggtaataaggctttagaactgctgataaagcggatcgttctcaggccctccccccggagtacttcagaatgcaataaatcaaaataatggc

SEQ ID NO: 211 - protein, 653 aa, Homo sapiens
RGRGPEAAAQEEAEEVGRSGPGRRAAQRRSPGLAMLLASAVVVWEWLNEHGRWRPYSPAVSHHIEAVVRAGPRAGGSVVLGQVDSRLAPYIIDLQSMNQFRQDTGTLRPVRRNYYDPSSAPGKGVVWEWENDNGSWTPYDMEVGITIQHAYEKQHPWIDLTSIGFSYVIDFNTMGQINRQTQRQRRVRRRLDLIYPMVTGTLPKAQSWPVSPGPATSPPMSPCSCPQCVLVMSVKAAVVNGSTGPLQLPVTRKNMPPPGVVKLPPLPGSGAKPLDSTGTIRGPLKTAPSQVIRRQASSMPTGTTMGSPASPPGPNSKTGRVALATLNRTNLQRLAIAQSRVLIASGVPTVPVKNLNGSSPVNPALAGITGILMSAAGLPVCLTRPPKLVLHPPPVSKSEIKSIPGVSNTSRKTTKKQAKKGKTPEEVLKKYLQKVRHPPDEDCTICMERLTAPSGYKGPQPTVKPDLVGKLSRCGHVYHIYCLVAMYNNGNKDGSLQCPTCKTIYGVKTGTQPPGKMEYHLIPHSLPGHPDCKTIRIIYSIPPGIQGPEHPNPGKSFSARGFPRHCYLPDSEKGRKVLKLLLVAWDRRLIFAIGTSSTTGESDTVIWNEVHHKTEFGSNLTGHGYPDANYLDNVLAELAAQGISEDSTAQEKD

SEQ ID NO: 212 - DNA, 5650 bp, Homo sapiens
ggcgcggtcgaggcccggaggcggcggcgcaggaggaagcggaggaggtcgggcgctcggggcccgggaggcgggccgcgcagcgccgcagccccgggctcgccatgctcctggcctcggccgtggtggtctgggaatggctgaacgagcacggccgctggcgtccctacagcccagcggtgagccaccacatcgaggcggtggtccgcgccggcccccgcgcggggggcagcgtggtgctgggccaggtggacagccgtctcgcgccctacatcatcgacctgcagtccatgaaccagttccgccaagacacgggaactctccgcccagttcgccgcaactactacgacccctcctcggcccctgggaagggcgtggtgtgggagtgggagaacgacaatggctcctggacgccctacgacatggaagtgggcatcaccatccagcatgcctatgagaagcagcacccctggatcgacctcacttccattggctttagctacgtaattgacttcaacaccatgggccagatcaaccgtcagacccagcgccaacgccgcgtccgccggcgcctcgacctcatctaccccatggtcacagggaccttgcctaaggctcagtcctggccagtcagccctgggccagccacctcgccccccatgtccccctgctcctgtccccagtgtgtcttggtgatgagtgttaaggcagccgtggtcaatggcagcactgggcccctacagctgccagtgacccgcaagaacatgccgcctcctggagtggtcaagctacccccactgccaggctctggggccaagccactggacagcacaggcaccattcgaggcccactgaagaccgccccatcgcaggtgatccggagacaagcctccagcatgcccactgggacaaccatgggctctcctgccagtcccccaggacccaacagcaagaccggaagggtggccctggccaccttgaatcgtaccaacctgcagcgactggccattgcccagtcccgggtgctgatcgcctctggggtccccacagtcccagtgaagaacctaaatgggtccagtcctgtcaaccctgccttggcaggaatcactgggatcctcatgagtgcagcggggctgcctgtgtgtctcaccaggccaccaaagctggtcctacacccaccccccgtcagcaagagtgaaataaaatccatcccaggggtttccaacacaagccgcaagaccaccaaaaaacaagccaagaaaggtaaaaccccagaggaagtgctaaaaaaatatctacagaaagtccggcacccaccagatgaggactgcaccatctgtatggaacgcctcacggccccctcaggctacaagggcccgcagcctacggtaaaacctgacctggtagggaagctgtccagatgcggccacgtctaccacatctactgcttggttgccatgtacaacaatgggaacaaggatggaagtttgcagtgtccaacctgcaagaccatttatggggtgaagacaggcacccaacctccagggaagatggagtaccacctcatcccccactccttgcctggccacccagactgcaaaaccatccggatcatctacagcatcccccccggcattcagggaccggaacacccgaatcctgggaagagtttcagcgcccgaggcttcccacgacactgttaccttccggacagcgagaaagggagaaaagttctgaagctgctgctcgtggcctgggatcgccgcctcatttttgccattggcacctccagcaccacaggcgagtcagacaccgtcatctggaatgaggtccaccacaagacagagtttggctctaatctcactggccatggctacccagatgccaattacctggataatgtgctggctgaactggctgcccagggcatctctgaggacagcactgcccaggagaaggactgaggccagaaaagctttgaggtgggaggggccatggagactgcaggacaggaagtgaggagagtgagtcaatgtagaagaagttggtgtcctgccctcccaactttctatcctcccctcctgccctgtgtccatccctcatccctcccaaccacagtgggagccagactgaatatagcgacatcattcataaatctcatccaacacaaagggagatgggatgagggccatcctgggtctgttcccatggagtttttggtgctgggtaggcaggaatcccctccctaccccacctcccaagtaggggcatggtcagcacacctagggtatgggcagtgcttaggcactccatatcctggctttgggaagccggggtttcttgcctcagccggcttcttgctacttccactctgctttgagactggagtttctgctattctccctctgctggaggcagggagctctcactgtgcaaggttggggggtgggcaaaggggtgaatcactaaactgctgtgacatcagaaactgatgccttggtgtagagcaaggaagcacttcttcccaagagggtcggagaaggaaaagcctctgggagcacattctgctgtcatcacagtccttggcttctctgggccctcctctcctcctcacagctctcacctgtccaaagaggcatctggttctctcatgtggatggatggactctggggttcctctttggagtggcatcccatgatgctgtttctagaccctctctgatcaaaccagagcctgcatcccactgagcatctgaactgtcctcagggagaggagcccacagccttcttcccaactcattctagaccagctcaaagattccatgagtttcatcgagtcactgtgagtggagcccatgctgggctctgtgccctctgtgtctgtgcatgcgcgtgtgtgtgtgggcgtgtgtgcattgctgggccagcttgaagggaaggcccgtcatgtccctgcactctgttttgcaagatgccaaaccccagttctgatggggctccaacagccaggctgtggtcctttgacgttcctcacctgttgccaacctatcccgtagtgaactgaaaccccaatgaagacagaactgtgcctggggagatgcaatgaggtgagggctgaactcatccttttatatttcttttcaagattggatcagagctcatctccatccagtcttgtttctatgaaggcttcaatctgtttccatgcaaatttgctaatcagagcccagagctgctgggtccctcatctccctcatctattatagattgacttacagcagggagagaatctctttagctcattcctaatggggttgggatcacaatatggtctggtccaatctgcatcttgttgtgtcccaagaccctatctcctccccaacattcttattgcctttggctcccagtaaggaacgaattgggggccagggaggagaacaggggggatcaagaagggaaacccaattccccctttgaaagtgggttctttgaactatgtgtttgggggaagttcctctggatactaatttgaatttatatacctcatgttttgggggtttgacgtatatatatatatatatatatatatatgcatatatatttcataatatttggaaggtttttgatgctagaaaaatggaaacaagagaaccttcaaaaatggtacttagatgggaactggaggccaatctttcataaagccagccccatagctgcttgctgttaggcctccagccattttgacattggggtggatagtcgattcacctgcctgtcagtcgattcacctgcctgtcacccagttctgtggatgtgctggtgctgagcctttgctctctttccaaatggttacagggatgttgatcagctccaccagagggagctctgatgggaggaattgctctgccatccttgtccctgtgtctcctgtcggcaggcagccattgtatctcaccagcagaccaggagactggtcccaaggttactgcaccacagggcaatttcctgccatagttaggaaggaaacacctgaactaaatggaagagacatccctgcggtgtttaatatcacacccatgccctttgtcaggttaccatgtacagagattacttggagagcctcatgccgtctctaccttcgcacactggtcaagtatctgctgagcttcttggccgcaaggatgcagaaataggctgagggtccatgggaagaaagacacaatgaggcagtaggaggtggggaagaaaagaagacagactttcaaaatggaattaggcactggggagagatcagtttccccacatcagggagaagaaggtataggtggggaagggggtggccaggagcagaaggaagaagactcaagatggaaagggagccgctgtgcctgtggcaataccacttggagaggtcgacttcataccttcaagccttttcccctgggcttttgattgtgtctgtgccccctttcttgtcctctctgcagatgcccagtaggggctacctcatcctcgtgctgttcttgtgtggctttctgggcagtagggatcttgaatttcctttctaacactgtgcccggcaaggcggggagcattcctctgccctttgtcttgtgccaacctggaaaggtgcagtctagatttcagtgagaaccctgccagctgagccctgtgcatctactaccttgacacagagtgttttcccactagaagctctgctctgctctcctggcccaagtaggggattccatgccttccctttcatggtcttagcaccagcagcctagtttctcccttccagagtctccagggatgacaaattggattggagacaaacctcgtcagatgctcatcccctaaaaggttaattgtgtatttgtggctgcgtgtgcctttgtgttttcattctcttcccatttttgtacattttggtcttctctgtggttttatacttggtcaaaagtactcgtcttggtattgcactgttgtgtgcatgagaaaactgggggaaggctcactggtacaagaaaggacccctgacccctttccttctctgtggtccccggcattagattgggggttctgggagaggcaggtgaatgtcctaagtgaattgttctgtttgtaactggaatgtttttgaagtctttggtgttgctccgtgaaaggacatcgccacctggtgctcatgaggtgtctttgcagaacaataaatggcaaatgaacaaccacaaaattgttactcttgttggccttctgctgtttgtagattagtgcacctatctgtgagggatttgggttacctccctgagtctgtaagcaaccacaagccctgccactgggtgggggaagtccctccccaaccacttaaaaacaaattttccacatattacccacccacacatttgacctggctagactctttgtttgcctaaaggaacagaccacattgctgggaaaatgagtaagtgaacgtgtgggagaaaaacacttttagaatcacgaatattcacttttaaaggtctctttgcctggctgcaatatagtgtgtgtttaaattatttacaggctgttgtttctcaaataaatgtttaatattaatcattcccaaactgacaagaacacaaaaataaaatgcaaatacagagcc

SEQ ID NO: 213 - protein, 1120 aa, Homo sapiens
MWRVKKLSLSLSPSPQTGKPSMRTPLRELTLQPGALTTSGKRSPACSSLTPSLCKLGLQEGSNNSSPVDFVNNKRTDLSSEHFSHSSKWLETCQHESDEQPLDPIPQISSTPKTSEEAVDPLGNYMVKTIVLVPSPLGQQQDMIFEARLDTMAETNSISLNGPLRTDDLVREEVAPCMGDRFSEVAAVSEKPIFQESPSHLLEESPPNPCSEQLHCSKESLSSRTEAVREDLVPSESNAFLPSSVLWLSPSTALAADFRVNHVDPEEEIVEHGAMEEREMRFPTHPKESETEDQALVSSVEDILSTCLTPNLVEMESQEAPGPAVEDVGRILGSDTESWMSPLAWLEKGVNTSVMLENLRQSLSLPSMLRDAAIGTTPFSTCSVGTWFTPSAPQEKSTNTSQTGLVGTKHSTSETEQLLCGRPPDLTALSRHDLEDNLLSSLVIVEFLSRQLRDWKSQLAVPHPETQDSSTQTDTSHSGITNKLQHLKESHEMGQALQQARNVMQSWVLISKELISLLHLSLLHLEEDKTTVNQESRRAETLVCCCFDLLKKLRAKLQSLKAEREEARHREEMALRGKDAAEIVLEAFCAHASQRISQLEQDLASMREFRGLLKDAQTQLVGLHAKQEELVQQTVSLTSTLQQDWRSMQLDYTTWTALLSRSRQLTEKLTVKSQQALQERDVAIEEKQEVSRVLEQVSAQLEECKGQTEQLELENIRLATDLRAQLQILANMDSQLKELQSQHTHCAQDLAMKDELLCQLTQSNEEQAAQCVKEEMALKHMQAELQQQQAVLAKEVRDLKETLEFADQENQVAHLELGQVECQLKTTLEVLRERSLQCENLKDTVENLTAKLASTIADNQEQDLEKTRQYSQKLGLLTEQLQSLTLFLQTKLKEKTEQETLLLSTACPPTQEHPLPNDRTFLGSILTAVADEEPESTPVPLLGSDKSAFTRVASMVSLQPAETPGMEESLAEMSIMTTELQSLCSLLQESKEEAIRTLQRKICELQARLQAQEEQHQEVQKAKEADIEKLNQALCLRYKNEKELQEVIQQNEKILEQIDKSGELISLREEVTHLTRSLRRAETETKVLQEAWQASWTPTASLWPPIGSRRKCGSLRRWTN

SEQ ID NO: 214 - DNA, 3791 bp, Homo sapiens
acagacggcgggtgaacatggcgtcctcgacttggtctgagacgtgataggcctgccttctggttgaagatgtggcgagtgaaaaaactgagcctcagcctgtcgccttcgccccagacgggaaaaccatctatgagaactcctctccgtgaacttaccctgcagcccggtgccctcaccacctctggaaaaagatcccccgcttgctcctcgctgaccccatcactgtgcaagctggggctgcaggaaggcagcaacaactcgtctccagtggattttgtaaataacaagaggacagacttatcttcagaacatttcagtcattcctcaaagtggctagaaacttgtcagcatgaatcagatgagcagcctctagatccaattccccaaattagctctactcctaaaacgtctgaggaagcagtagacccactgggcaattatatggttaaaaccatcgtccttgtaccatctccactggggcagcaacaagacatgatatttgaggcccgtttagataccatggcagagacaaacagcatatctttaaatggacctttgagaacagacgatctggtgagagaggaggtggcaccctgcatgggagacaggttttcagaagttgctgctgtatctgagaaacctatctttcaggaatctccgtcccatctcttagaggagtctccaccaaatccctgttctgaacaactacattgctccaaggaaagcctgagcagtagaactgaggctgtgcgtgaggacttagtaccttctgaaagtaacgccttcttgccttcctctgttctctggctttccccttcaactgccttggcagcagatttccgtgtcaatcatgtggacccagaggaggaaattgtagagcatggagctatggaggaaagagaaatgaggtttcccacacatcctaaggagtctgaaacagaagatcaagcacttgtctcaagtgtggaagatattctgtccacatgcctgacaccaaatctagtagaaatggaatcccaagaagctccaggcccagcagtagaagatgttggtaggattcttggctctgatacagagtcttggatgtccccactggcctggctggaaaaaggtgtaaatacctccgtcatgctggaaaatctccgccaaagcttatcccttccctcgatgcttcgggatgctgcaattggcactacccctttctctacttgctcggtggggacttggtttactccttcagcaccacaggaaaagagtacaaacacatcccagacaggcctggttggcaccaagcacagtacttctgagacagagcagctcctgtgtggccggcctccagatctgactgccttgtctcgacatgacttggaagataacctgctgagctctcttgtcattgtggagtttctctcccgccagcttcgggactggaagagccagctggctgtccctcacccagaaacccaggacagtagcacacagactgacacatctcacagtgggataactaataaacttcagcatcttaaggagagccatgagatgggacaggccctacagcaggccagaaatgtcatgcaatcatgggtgcttatctctaaagagctgatatccttgcttcacctatccctgttgcatttagaagaagataagactactgtgaatcaggagtctcggcgtgcagaaacattggtctgttgctgttttgatttgctgaagaaattgagggcaaagctccagagcctcaaagcagaaagggaggaggcaaggcacagagaggaaatggctctcagaggcaaggatgcggcagagatagtgttggaggctttctgtgcacacgccagccagcgcatcagccagctggaacaggacctagcatccatgcgggaattcagaggccttctgaaggatgcccagacccaactggtagggcttcatgccaagcaagaagagctggttcagcagacagtgagtcttacttctaccttgcaacaagactggaggtccatgcaactggattatacaacatggacagctttgctgagtcggtcccgacaactcacagagaaactcacagtcaagagccagcaagccctgcaggaacgtgatgtggcaattgaggaaaagcaggaggtttctagggtgctggaacaagtctctgcccagttagaggagtgcaaaggccaaacagaacaactggagttggaaaacattcgtctagcaacagatctccgggctcagttgcagattctggccaacatggacagccagctaaaagagctacagagtcagcatacccattgtgcccaggacctggctatgaaggatgagttactctgccagcttacccagagcaatgaggagcaggctgctcaatgcgtaaaggaagagatggcactaaaacacatgcaggcagaactgcagcagcaacaagctgtcctggccaaagaggtgcgggacctgaaagagaccttggagtttgcagaccaggagaatcaggttgctcacctggagctgggtcaggttgagtgtcaattgaaaaccacactggaagtgctccgggagcgcagcttgcagtgtgagaacctcaaggacactgtagagaacctaacggctaaactggccagcaccatagcagataaccaggagcaagatctggagaaaacacggcagtactctcaaaagctagggctgctgactgagcaactacagagcctgactctctttctacagacaaaactaaaggagaagactgaacaagagacccttctgctgagtacagcctgtcctcccacccaggaacaccctctgcctaatgacaggaccttcctgggaagcatcttgacagcagtggcagatgaagagccagaatcaactcctgtgcccttgcttggaagtgacaagagtgctttcacccgagtagcatcaatggtttcccttcagcccgcagagaccccaggcatggaggagagcctggcagaaatgagtattatgactactgagcttcagagtctttgttccctgctacaagagtctaaagaagaagccatcaggactctgcagcgaaaaatttgtgagctgcaagctaggctgcaggcccaggaagaacagcatcaggaagtccagaaggcaaaagaagcagacatagagaagctgaaccaggccttgtgcttgcgctacaagaatgaaaaggagctccaggaagtgatacagcagaatgagaagatcctagaacagatagacaagagtggcgagctcataagccttagagaggaggtgacccaccttacccgctcacttcggcgtgcggagacagagaccaaagtgctccaggaggcctggcaggccagctggactccaactgccagcctatggccaccaattggatccaggagaaagtgtggctctctcaggaggtggacaaactgagagtgatgttcctggagatgaaaaatgagaaggaaaactcctgatcaagttccagagcccatagaaatatcctagaggagaaccttcggcgctctgacaaggagttagaaaaactagatgacattgttcagcatatttataagaccctgctctctattccagaggtggtgaggggatgcaaagaactacagggattgctggaatttctgagctaagaaactgaaagccagaatttgtttcacctctttttacctgcaatacccccttaccccaataccaagaccaactggcatagagccaactgagataaatgctatttaaataaagtgtatttaatgaaaaaaaaaaaaaaaaaaaaa

SEQ ID NO: 215 - protein, 193 aa, Homo sapiens
MPVWGGGNKCGACGRTVYHAEEVQCDGRSFHRCCFLCMVCRKNLDSTTVAIHDEEIYCKSCYGKKYGPKGYGYGQGAGTLNMDRGERLGIKPESVQPHRPTTNPNTSKFAQKYGGAEKCSRCGDSVYAAEKIIGAGKPWHKNCFRCAKCGKSLESTTLTEKEGEIYCKGCYAKNFGPKGFGYGQGAGALVHAQ

SEQ ID NO: 216 - DNA, 901 bp, Homo sapiens
gggatctcggactccctggaccctccctccagcccagcctcgctagctccgcctgcggtacgtgctcccgcctccgactcaaaatgcctgtctggggaggtggaaacaagtgtggggcctgtgggaggaccgtgtaccacgcagaagaggtgcagtgtgatggcaggagcttccaccgctgctgctttctctgcatggtttgcaggaaaaatttagatagcacaacagtggcaattcacgatgaagagatctactgcaaatcctgctacggaaagaagtatgggccaaaaggctacggttatggccagggcgctggcacgcttaacatggaccgtggcgagaggctgggcatcaaaccagagagtgttcagcctcacaggcctacaacaaatccaaacacttctaaatttgctcagaaatatggaggtgctgagaagtgttccagatgtggggattctgtatatgctgccgagaagataattggagctggaaagccctggcacaaaaactgtttccgatgtgcaaagtgtgggaagagtcttgaatcaacaactctgactgaaaaagaaggtgaaatctattgtaaaggatgctatgcaaagaactttgggcccaagggatttggctatggccaaggagcaggggctcttgttcatgcccagtaagatgtaaaccctgaactaaacatcacacactgagaatctcttcataatctaggcacagataatctttaacactaaactactgtgaaattctaccagcattaagtactgtatatcgccctgtacttggataggctggctaactcgtaggaagagagcactgtatggtatccttttgctttattcaccagcattttgggggaacatttcttttacattttaaataaaacttcagcttg

SEQ ID NO: 217 - protein, 1531 aa, Homo sapiens
MEVSPLQPVNENMQVNKIKKNEDAKKRLSVERIYQKKTQLEHILLRPDTYIGSVELVTQQMWVYDEDVGINYREVTFVPGLYKIFDEILVNAADNKQRDPKMSCIRVTIDPENNLISIWNNGKGIPVVEHKVEKMYVPALIFGQLLTSSNYDDDEKKVTGGRNGYGAKLCNIFSTKFTVETASREYKKMFKQTWMDNMGRAGEMELKPFNGEDYTCITFQPDLSKFKMQSLDKDIVALMVRRAYDIAGSTKDVKVFLNGNKLPVKGFRSYVDMYLKDKLDETGNSLKVIHEQVNHRWEVCLTMSEKGFQQISFVNSIATSKGGRHVDYVADQIVTKLVDVVKKKNKGGVAVKAHQVKNHMWIFVNALIENPTFDSQTKENMTLQPKSFGSTCQLSEKFIKAAIGCGIVESILNWVKFKAQVQLNKKCSAVKHNRIKGIPKLDDANDAGGRNSTECTLILTEGDSAKTLAVSGLGVVGRDKYGVFPLRGKILNVREASHKQIMENAEINNIIKIVGLQYKKNYEDEDSLKTLRYGKIMIMTDQDQDGSHIKGLLINFIHHNWPSLLRHRFLEEFITPIVKVSKNKQEMAFYSLPEFEEWKSSTPNHKKWKVKYYKGLGTSTSKEAKEYFADMKRHRIQFKYSGPEDDAAISLAFSKKQIDDRKEWLTNFMEDRRQRKLLGLPEDYLYGQTTTYLTYNDFINKELILFSNSDNERSIPSMVDGLKPGQRKVLFTCFKRNDKREVKVAQLAGSVAEMSSYHHGEMSLMMTIINLAQNFVGSNNLNLLQPIGQFGTRLHGGKDSASPRYIFTMLSSLARLLFPPKDDHTLKFLYDDNQRVEPEWYIPIIPMVLINGAEGIGTGWSCKIPNFDVREIVNNIRRLMDGEEPLPMLPSYKNFKGTIEELAPNQYVISGEVAILNSTTIEISELPVRTWTQTYKEQVLEPMLNGTEKTPPLITDYREYHTDTTVKFVVKMTEEKLAEAERVGLHKVFKLQTSLTCNSMVLFDHVGCLKKYDTVLDILRDFFELRLKYYGLRKEWLLGMLGAESAKLNNQARFILEKIDGKIIIENKPKKELIKVLIQRGYDSDPVKAWKEAQQKVPDEEENEESDNEKETEKSDSVTDSGPTFNYLLDMPLWYLTKEKKDELCRLRNEKEQELDTLKRKSPSDLWKEDLATFIEELEAVEAKEKQDEQVGLPGKGGKAKGKKTQMAEVLPSPRGQRVIPRITIEMKAEAEKKNKKKIKNENTEGSPQEDGVELEGLKQRLEKKQKREPGTKTKKQTTLAFKPIKKGKKRNPWSDSESDRSSDESNFDVPPRETEPRRAATKTKFTMDLDSDEDFSDFDEKTDDEDFVPSDASPPKTKTSPKLSNKELKPQKSVVSDLEADDVKGSVPLSSSPPATHFPDETEITNPVPKKNVTVKKTAAKSQSSTSTTGAKKRAAPKGTKRDPALNSGVSQKPDPAKTKNRRKRKPSTSDDSDSNFEKIVSKAVTSKKSKGESDDFHMDFDSAVAPRAKSVRAKKPIKYLEESDEDDLF

SEQ ID NO: 218 - DNA, 5698 bp, Homo sapiens
aggttcaagtggagctctcctaaccgacgcgcgtctgtggagaagcggcttggtcgggggtggtctcgtggggtcctgcctgtttagtcgctttcagggttcttgagccccttcacgaccgtcaccatggaagtgtcaccattgcagcctgtaaatgaaaatatgcaagtcaacaaaataaagaaaaatgaagatgctaagaaaagactgtctgttgaaagaatctatcaaaagaaaacacaattggaacatattttgctccgcccagacacctacattggttctgtggaattagtgacccagcaaatgtgggtttacgatgaagatgttggcattaactatagggaagtcacttttgttcctggtttgtacaaaatctttgatgagattctagttaatgctgcggacaacaaacaaagggacccaaaaatgtcttgtattagagtcacaattgatccggaaaacaatttaattagtatatggaataatggaaaaggtattcctgttgttgaacacaaagttgaaaagatgtatgtcccagctctcatatttggacagctcctaacttctagtaactatgatgatgatgaaaagaaagtgacaggtggtcgaaatggctatggagccaaattgtgtaacatattcagtaccaaatttactgtggaaacagccagtagagaatacaagaaaatgttcaaacagacatggatggataatatgggaagagctggtgagatggaactcaagcccttcaatggagaagattatacatgtatcacctttcagcctgatttgtctaagtttaaaatgcaaagcctggacaaagatattgttgcactaatggtcagaagagcatatgatattgctggatccaccaaagatgtcaaagtctttcttaatggaaataaactgccagtaaaaggatttcgtagttatgtggacatgtatttgaaggacaagttggatgaaactggtaactccttgaaagtaatacatgaacaagtaaaccacaggtgggaagtgtgtttaactatgagtgaaaaaggctttcagcaaattagctttgtcaacagcattgctacatccaagggtggcagacatgttgattatgtagctgatcagattgtgactaaacttgttgatgttgtgaagaagaagaacaagggtggtgttgcagtaaaagcacatcaggtgaaaaatcacatgtggatttttgtaaatgccttaattgaaaacccaacctttgactctcagacaaaagaaaacatgactttacaacccaagagctttggatcaacatgccaattgagtgaaaaatttatcaaagctgccattggctgtggtattgtagaaagcatactaaactgggtgaagtttaaggcccaagtccagttaaacaagaagtgttcagctgtaaaacataatagaatcaagggaattcccaaactcgatgatgccaatgatgcagggggccgaaactccactgagtgtacgcttatcctgactgagggagattcagccaaaactttggctgtttcaggccttggtgtggttgggagagacaaatatggggttttccctcttagaggaaaaatactcaatgttcgagaagcttctcataagcagatcatggaaaatgctgagattaacaatatcatcaagattgtgggtcttcagtacaagaaaaactatgaagatgaagattcattgaagacgcttcgttatgggaagataatgattatgacagatcaggaccaagatggttcccacatcaaaggcttgctgattaattttatccatcacaactggccctctcttctgcgacatcgttttctggaggaatttatcactcccattgtaaaggtatctaaaaacaagcaagaaatggcattttacagccttcctgaatttgaagagtggaagagttctactccaaatcataaaaaatggaaagtcaaatattacaaaggtttgggcaccagcacatcaaaggaagctaaagaatactttgcagatatgaaaagacatcgtatccagttcaaatattctggtcctgaagatgatgctgctatcagcctggcctttagcaaaaaacagatagatgatcgaaaggaatggttaactaatttcatggaggatagaagacaacgaaagttacttgggcttcctgaggattacttgtatggacaaactaccacatatctgacatataatgacttcatcaacaaggaacttatcttgttctcaaattctgataacgagagatctatcccttctatggtggatggtttgaaaccaggtcagagaaaggttttgtttacttgcttcaaacggaatgacaagcgagaagtaaaggttgcccaattagctggatcagtggctgaaatgtcttcttatcatcatggtgagatgtcactaatgatgaccattatcaatttggctcagaattttgtgggtagcaataatctaaacctcttgcagcccattggtcagtttggtaccaggctacatggtggcaaggattctgctagtccacgatacatctttacaatgctcagctctttggctcgattgttatttccaccaaaagatgatcacacgttgaagtttttatatgatgacaaccagcgtgttgagcctgaatggtacattcctattattcccatggtgctgataaatggtgctgaaggaatcggtactgggtggtcctgcaaaatccccaactttgatgtgcgtgaaattgtaaataacatcaggcgtttgatggatggagaagaacctttgccaatgcttccaagttacaagaacttcaagggtactattgaagaactggctccaaatcaatatgtgattagtggtgaagtagctattcttaattctacaaccattgaaatctcagagcttcccgtcagaacatggacccagacatacaaagaacaagttctagaacccatgttgaatggcaccgagaagacacctcctctcataacagactatagggaataccatacagataccactgtgaaatttgttgtgaagatgactgaagaaaaactggcagaggcagagagagttggactacacaaagtcttcaaactccaaactagtctcacatgcaactctatggtgctttttgaccacgtaggctgtttaaagaaatatgacacggtgttggatattctaagagacttttttgaactcagacttaaatattatggattaagaaaagaatggctcctaggaatgcttggtgctgaatctgctaaactgaataatcaggctcgctttatcttagagaaaatagatggcaaaataatcattgaaaataagcctaagaaagaattaattaaagttctgattcagaggggatatgattcggatcctgtgaaggcctggaaagaagcccagcaaaaggttccagatgaagaagaaaatgaagagagtgacaacgaaaaggaaactgaaaagagtgactccgtaacagattctggaccaaccttcaactatcttcttgatatgcccctttggtatttaaccaaggaaaagaaagatgaactctgcaggctaagaaatgaaaaagaacaagagctggacacattaaaaagaaagagtccatcagatttgtggaaagaagacttggctacatttattgaagaattggaggctgttgaagccaaggaaaaacaagatgaacaagtcggacttcctgggaaaggggggaaggccaaggggaaaaaaacacaaatggctgaagttttgccttctccgcgtggtcaaagagtcattccacgaataaccatagaaatgaaagcagaggcagaaaagaaaaataaaaagaaaattaagaatgaaaatactgaaggaagccctcaagaagatggtgtggaactagaaggcctaaaacaaagattagaaaagaaacagaaaagagaaccaggtacaaagacaaagaaacaaactacattggcatttaagccaatcaaaaaaggaaagaagagaaatccctggtctgattcagaatcagataggagcagtgacgaaagtaattttgatgtccctccacgagaaacagagccacggagagcagcaacaaaaacaaaattcacaatggatttggattcagatgaagatttctcagattttgatgaaaaaactgatgatgaagattttgtcccatcagatgctagtccacctaagaccaaaacttccccaaaacttagtaacaaagaactgaaaccacagaaaagtgtcgtgtcagaccttgaagctgatgatgttaagggcagtgtaccactgtcttcaagccctcctgctacacatttcccagatgaaactgaaattacaaacccagttcctaaaaagaatgtgacagtgaagaagacagcagcaaaaagtcagtcttccacctccactaccggtgccaaaaaaagggctgccccaaaaggaactaaaagggatccagctttgaattctggtgtctctcaaaagcctgatcctgccaaaaccaagaatcgccgcaaaaggaagccatccacttctgatgattctgactctaattttgagaaaattgtttcgaaagcagtcacaagcaagaaatccaagggggagagtgatgacttccatatggactttgactcagctgtggctcctcgggcaaaatctgtacgggcaaagaaacctataaagtacctggaagagtcagatgaagatgatctgttttaaaatgtgaggcgattattttaagtaattatcttaccaagcccaagactggttttaaagttacctgaagctcttaacttcctcccctctgaatttagtttggggaaggtgtttttagtacaagacatcaaagtgaagtaaagcccaagtgttctttagctttttataatactgtctaaatagtgaccatctcatgggcattgttttcttctctgctttgtctgtgttttgagtctgctttcttttgtctttaaaacctgatttttaagttcttctgaactgtagaaatagctatctgatcacttcagcgtaaagcagtgtgtttattaaccatccactaagctaaaactagagcagtttgatttaaaagtgtcactcttcctccttttctactttcagtagatatgagatagagcataattatctgttttatcttagttttatacataatttaccatcagatagaactttatggttctagtacagatactctactacactcagcctcttatgtgccaagtttttctttaagcaatgagaaattgctcatgttcttcatcttctcaaatcatcagaggccaaagaaaaacactttggctgtgtctataacttgacacagtcaatagaatgaagaaaattagagtagttatgtgattatttcagctcttgacctgtcccctctggctgcctctgagtctgaatctcccaaagagagaaaccaatttctaagaggactggattgcagaagactcggggacaacatttgatccaagatcttaaatgttatattgataaccatgctcagcaatgagctattagattcattttgggaaatctccataatttcaatttgtaaactttgttaagacctgtctacattgttatatgtgtgtgacttgagtaatgttatcaacgtttttgtaaatatttactatgtttttctattagctaaattccaacaattttgtactttaataaa

SEQ ID NO: 219 - protein, 205 aa, Homo sapiens
MAASTASHRPIKGILKNKTSTTSSMVASAEQPRGNVDEELSKKSQKWDEMNILATYHPADKDYGLMKIDEPSTPYHSMMGDDEDACSDTEATEAMAPDILARKLAAAEGLEPKYRIQEQESSGEEDSDLSPEEREKKRQFEMKRKLHYNEGLNIKLARQLISKDLHDDDEDEEMLETADGESMNTEESNQGSTPSDQQQNKLRSS

SEQ ID NO: 220 - DNA, 556 bp, Homo sapiens
gttgactttttcttttatctttgcaggatctactccaagtgaccaacagcaaaacaaattacgaagttcatagacgagatttgttcaacactgcaattgtttgttagatgtaaaccctgtgactatagtacgttgcttcttgttcttcacaattcatgacttaagtaccaaaatgcataccagttattatatattgccaagaattaaatgataaacttagagactgattagactgaaaatgcctaatcgatatatatattcttgtgcctagtactttaccacaaatacagtgtaatatcatcagtccaaaactgcattacttttgtaaaaacactggttaatttgtataagatattatagagctttttatgctttagaagttaaacaatatctttgggggggaactaatttattttcatcacttgaaatgtggtagctcttacaaagtttattgatttgatttttttaaaaatcaaaagccaattgaacaacaggatatatagactgataaatatttaggctgaatagtattttaacacttgtcttcaacttgatt

SEQ ID NO: 221 - protein, 196 aa, Homo sapiens
MFCEKAMELIRELHRAPEGQLPAFNEDGLRQVLEEMKALYEQNQSDVNEAKSGGRSDLIPTIKFRHCSLLRNRRCTVAYLYDRLLRIRALRWEYGSVLPNALRFHMAAEEMEWFNNYKRSLATYMRSLGGDEGLDITQDMKPPKSLYIEVRCLKDYGEFEVDDGTSVLLKKNSQHFLPRWKCEQLIRQGVLEHILS

SEQ ID NO: 222 - DNA, 3248 bp, Homo sapiens
ctagaacgaaaggagtgaggcgccgagagcccagataccattttggcgtgagagctggtggttggcaaggccgcgggagtgggaagcgtccgccatgttctgcgaaaaagccatggaactgatccgcgagctgcatcgcgcgcccgaagggcaactgcctgccttcaacgaggatggactcagacaagttctggaggagatgaaagctttgtatgaacaaaaccagtctgatgtgaatgaagcaaagtcaggtggacgaagtgatttgataccaactatcaaatttcgacactgttctctgttaagaaatcgacgctgcactgtagcatacctgtatgaccgcttgcttcggatcagagcactcagatgggaatatggtagcgtcttgccaaatgcattacgatttcacatggctgctgaagaaatggagtggtttaataattataaaagatctcttgctacttatatgaggtcactgggaggagatgaaggtttggacattacacaggatatgaaaccaccaaaaagcctatatattgaagtccggtgtctaaaagactatggagaatttgaagttgatgatggcacttcagtcctattaaaaaaaaatagccagcactttttacctcgatggaaatgtgagcagctgatcagacaaggagtcctggagcacatcctgtcatgaccatgcgccgaggcacttccaggcttcactcaactcatggactcctctgtactcactctctccaccctcccttcacctccctctttgattttagaagctatagacattgtttaagataactaagaatacttggctaagaagtataatttgctaactattaaggactttctttttttaatgttgtacactattcttcctactcttttttggttttggttttgttttgtagagactgtctcactatgttgcccaagctggtctcaaactcctggcctcaagcagtcctcccaccttagcttctcaaagtgttgagatcacaggcgtgagccactgcacccgacccctactcctttttctaataagctgtatctgtaatcacagcattcctacagttgttacagtgtgttttttaaatgaaagtaaacatggttacatttgaatctcttaaataatcagtcacttggctggacaggaagaaggtagatcctgtgtgtcttgttttctggtcatgtgtattgtacaagctagagagctgaatttctgagatacacattttcaaatcacatgcaagtgaagatgatggtctgtagaaattttcagtatatataatgtttaatgacatactaatttatcatctggctatttgggaaggaaggacacacatggattttgcacatttccaccatggtggctggtgtggcttgtggctatggggtgatcaccagtatcaccactttggaaggggacagtgaaattggggctagagaaggaactttgtacagttttccctgagattcagattgactgaaaagtcacatgaagagttgattgtcttttaatggtatgttttaaacagctgacattttaaattttgatgaaatccagtttattcgtttgttcttttatgctttgggtgttgcatccgagaaatcttttcccatcccaagatcacaattttttttcctttttacttctagaagtgttataattttaagctttatactttggtctatgacccgtttttttttttgttttgttttgttttttcgtttgtttctttgttttgagatggagtcttgttctgtcacccaggctggggtgcagtggcgtgatcttggctcactgcaatctctatcccctgggttcaagtgattctcttgtctcagcctcccaagtagctgggattacaggcacaggccgccacgcccggctaatttttgtatttttagtagagacagagttttaccatgttggccaggctggtttcaaactcctgacctcaagtgacccaccttggcctcccaaagttttgggattacaagtgtgggccaccgcggccagcctatgatccattttgaatgaattttttatatggtgcaaggtgtcaatccaccttcactttttcttgggaatatagatatccagctgtttcactaccattttttgaaaggactgccctttgctctatcacctttgcatttttgttaaaaagtagttgtcaatgtatatgtgggtttatttcaggactctgttttgttccattgacctgtttttctctcctgaatgccaataccatatttgtatgtagtgtatgtaattttctaataattcttgaaacagatagtattaatgcgtcatatttttgctgttgtttgtattttttgtggagatggggtttcaccatgttggccaggctgtgttgaactcctgagctaaagcaatacacttgcctcgtcctccccatgtgctgggattacaggcgtgagccttggtgctggcccagtgtaccacatttctttttgagatttgttttggctatgttaagtcctttgcttttgatgtgaaatttgggaacaggcagggtgtggtggcttatgcctgtaatcctagaactttgggaggcctagatgggtggatcacttgagctcaggagttccagaccagcccgggcctatggcgaaactccgtctctacaaaaaatagaaaaaattagccaggtgtggtggtgcatgcctgtagtcacagttacacggcaggctgaggtgggaggatcacttgaaccccagaggtcaagactgcagtgagctgagatcacaccactgtactccagcctgggtgacaaagtgagactctatctcaaaaagaaattaggatcaacttgtcaatttctacaacaacaacaacaaaaacccctgttgggcaccttgattgagattgcattgaatttatataaaactgttgggagaattgacatcttaataatattgagtcttctggcctataaacaaggtctgtcttcctaggtattaatgttttgtcttctatttctcttaataatcttttgtagttttcagtgtacaggtctaccatgtcagcatttcatagttttgatgctaaatggtattttaaaatttcaaattctaaccacttgttgctagtaaatagaaatacaattgatgttgaacttgtatccttcagccttgctaaactgtgagttctcatggtgtttttgtaaattacatcaacagtcatgtgttctatgaataaagagttttactccttc

SEQ ID NO: 223 - protein, 553 aa, Homo sapiens
MMIDETKCPPCSNVLCNPSEPPPPRRLNMTAEQFTGDHTQHFLDGGEMKVEQLFQEFGNRKSNTIQSDGISDSEKCSPTVSQGKSSDCLNTVKSNSSSKAPKVVPLTPEQALKQYKHHLTAYEKLEIINYPEIYFVGPNAKKRHGVIGGPNNGGYDDADGAYIHVPRDHLAYRYEVLKIIGKGSFGQVARVYDHKLRQYVALKMVRNEKRFHRQAAEEIRILEHLKKQDKTGSMNVIHMLESFTFRNHVCMAFELLSIDLYELIKKNKFQGFSVQLVRKFAQSILQSLDALHKNKIIHCDLKPENILLKHHGRSSTKVIDFGSSCFEYQKLYTYIQSRFYRAPEIILGSRYSTPIDIWSFRCILAELLTGQPLFPGEDEGDQLACMMELLGMPPPKLLEQSKRAKYFINSKGIPRYCSVTTQADGRVVLVGGRSRRGKKRGPPGSKDWGTALKGCDDYLFIEFLKRCLHWDPSARLTPAQALRHPWISKSVPRPLTTIDKVSGKRVVNPASAFQGLGSKLPPVVGIANKLKANLMSETNGSIPLCSVLPKLIS

SEQ ID NO: 224 - DNA, 2141 bp, Homo sapiens
cgggagcgaaagtgcgctgagctgcagtgtctggtcgagagtacccgtgggagcgtcgcgccgcggaggcagccgtcccggcgtaggtggcgtggccgaccggacccccaactggcgcctctccccgagcggggtcccgagctaggagatgggaggcacagctcgtgggcctgggcggaaggatgcggggccgcctggggccgggctcccgccccagcagcggagttgggggatggtgtctatgacaccttcatgatgatagatgaaaccaaatgtcccccctgttcaaatgtactctgcaatccttctgaaccacctccacccagaagactaaatatgaccgctgagcagtttacaggagatcatactcagcactttttggatggaggtgagatgaaggtagaacagctgtttcaagaatttggcaacagaaaatccaatactattcagtcagatggcatcagtgactctgaaaaatgctctcctactgtttctcagggtaaaagttcagattgcttgaatacagtaaaatccaacagttcatccaaggcacccaaagtggtgcctctgactccagaacaagccctgaagcaatataaacaccacctcactgcctatgagaaactggaaataattaattatccagaaatttactttgtaggtccaaatgccaagaaaagacatggagttattggtggtcccaataatggagggtatgatgatgcagatggggcctatattcatgtacctcgagaccatctagcttatcgatatgaggtgctgaaaattattggcaaggggagttttgggcaggtggccagggtctatgatcacaaacttcgacagtacgtggccctaaaaatggtgcgcaatgagaagcgctttcatcgtcaagcagctgaggagatccggattttggagcatcttaagaaacaggataaaactggtagtatgaacgttatccacatgctggaaagtttcacattccggaaccatgtttgcatggcctttgaattgctgagcatagacctttatgagctgattaaaaaaaataagtttcagggttttagcgtccagttggtacgcaagtttgcccagtccatcttgcaatctttggatgccctccacaaaaataagattattcactgcgatctgaagccagaaaacattctcctgaaacaccacgggcgcagttcaaccaaggtcattgactttgggtccagctgtttcgagtaccagaagctctacacatatatccagtctcggttctacagagctccagaaatcatcttaggaagccgctacagcacaccaattgacatatggagttttcgctgcatccttgcagaacttttaacaggacagcctctcttccctggagaggatgaaggagaccagttggcctgcatgatggagcttctagggatgccaccaccaaaacttctggagcaatccaaacgtgccaagtactttattaattccaagggcataccccgctactgctctgtgactacccaggcagatgggagggttgtgcttgtggggggtcgctcacgtaggggtaaaaagcggggtcccccaggcagcaaagactgggggacagcactgaaagggtgtgatgactacttgtttatagagttcttgaaaaggtgtcttcactgggacccctctgcccgcttgaccccagctcaagcattaagacacccttggattagcaagtctgtccccagacctctcaccaccatagacaaggtgtcagggaaacgggtagttaatcctgcaagtgctttccagggattgggttctaagctgcctccagttgttggaatagccaataagcttaaagctaacttaatgtcagaaaccaatggtagtatacccctatgcagtgtattgccaaaactgattagctagtggacagagatatgcccagagatgcatatgtgtatatttttatgatcttacaaacctgcaaatggaaaaaatgcaagcccattggtggatgtttttgttagagtagactttttttaaacaagacaaaacatttttatatgattataaaagaattcttcaagggctaattacctaaccagcttgtattggccatctggaatatgcattaaatgactttttataggtca

SEQ ID NO: 225 - protein, 1056 aa, Homo sapiens
MASQPNSSAKKKEEKGKNIQVVVRCRPFNLAERKASAHSIVECDPVRKEVSVRTGGLADKSSRKTYTFDMVFGASTKQIDVYRSVVCPILDEVIMGYNCTIFAYGQTGTGKTFTMEGERSPNEEYTWEEDPLAGIIPRTLHQIFEKLTDNGTEFSVKVSLLEIYNEELFDLLNPSSDVSERLQMFDDPRNKRGVIIKGLEEITVHNKDEVYQILEKGAAKRTTAATLMNAYSSRSHSVFSVTIHMKETTIDGEELVKIGKLNLVDLAGSENIGRSGAVDKRAREAGNINQSLLTLGRVITALVERTPHVPYRESKLTRILQDSLGGRTRTSIIATISPASLNLEETLSTLEYAHRAKNILNKPEVNQKLTKKALIKEYTEEIERLKRDLAAAREKNGVYISEENFRVMSGKLTVQEEQIVELIEKIGAVEEELNRVTELFMDNKNELDQCKSDLQNKTQELETTQKHLQETKLQLVKEEYITSALESTEEKLHDAASKLLNTVEETTKDVSGLHSKLDRKKAVDQHNAEAQDIFGKNLNSLFNNMEELIKDGSSKQKAMLEVHKTLFGNLLSSSVSALDTITTVALGSLTSIPENVSTHVSQIFNMILKEQSLAAESKTVLQELINVLKTDLLSSLEMILSPTVVSILKINSQLKHIFKTSLTVADKIEDQKKELDGFLSILCNNLHELQENTICSLVESQKQCGNLTEDLKTIKQTHSQELCKLMNLWTERFCALEEKCENIQKPLSSVQENIQQKSKDIVNKMTFHSQKFCADSDGFSQELRNFNQEGTKLVEESVKHSDKLNGNLEKISQETEQRCESLNTRTVYFSEQWVSSLNEREQELHNLLEVVSQCCEASSSDITEKSDGRKAAHEKQHNIFLDQMTIDEDKLIAQNLELNETIKIGLTKLNCFLEQDLKLDIPTGTTPQRKSYLYPSTLVRTEPREHLLDQLKRKQPELLMMLNCSENNKEETIPDVDVEEAVLGQYTEEPLSQEPSVDAGVDCSSIGGVPFFQHKKSHGKDKENRGINTLERSKVEETTEHLVTKSRLPLRAQINL

SEQ ID NO: 226 - DNA, 4908 bp, Homo sapiens
acctgcgtgcagtcggtcctccaggccacgcagcgcccgagagtaccagggagactccggcccctgtcggcgccaagcccctccgcccctcacagcgcccaggtccgcggccgggccttgattttttggcggggaccgtcatggcgtcgcagccaaattcgtctgcgaagaagaaagaggagaaggggaagaacatccaggtggtggtgagatgcagaccatttaatttggcagagcggaaagctagcgcccattcaatagtagaatgtgatcctgtacgaaaagaagttagtgtacgaactggaggattggctgacaagagctcaaggaaaacatacacttttgatatggtgtttggagcatctactaaacagattgatgtttaccgaagtgttgtttgtccaattctggatgaagttattatgggctataattgcactatctttgcgtatggccaaactggcactggaaaaacttttacaatggaaggtgaaaggtcacctaatgaagagtatacctgggaagaggatcccttggctggtataattccacgtacccttcatcaaatttttgagaaacttactgataatggtactgaattttcagtcaaagtgtctctgttggagatctataatgaagagctttttgatcttcttaatccatcatctgatgtttctgagagactacagatgtttgatgatccccgtaacaagagaggagtgataattaaaggtttagaagaaattacagtacacaacaaggatgaagtctatcaaattttagaaaagggggcagcaaaaaggacaactgcagctactctgatgaatgcatactctagtcgttcccactcagttttctctgttacaatacatatgaaagaaactacgattgatggagaagagcttgttaaaatcggaaagttgaacttggttgatcttgcaggaagtgaaaacattggccgttctggagctgttgataagagagctcgggaagctggaaatataaatcaatccctgttgactttgggaagggtcattactgcccttgtagaaagaacacctcatgttccttatcgagaatctaaactaactagaatcctccaggattctcttggagggcgtacaagaacatctataattgcaacaatttctcctgcatctctcaatcttgaggaaactctgagtacattggaatatgctcatagagcaaagaacatattgaataagcctgaagtgaatcagaaactcaccaaaaaagctcttattaaggagtatacggaggagatagaacgtttaaaacgagatcttgctgcagcccgtgagaaaaatggagtgtatatttctgaagaaaattttagagtcatgagtggaaaattaactgttcaagaagagcagattgtagaattgattgaaaaaattggtgctgttgaggaggagctgaatagggttacagagttgtttatggataataaaaatgaacttgaccagtgtaaatctgacctgcaaaataaaacacaagaacttgaaaccactcaaaaacatttgcaagaaactaaattacaacttgttaaagaagaatatatcacatcagctttggaaagtactgaggagaaacttcatgatgctgccagcaagctgcttaacacagttgaagaaactacaaaagatgtatctggtctccattccaaactggatcgtaagaaggcagttgaccaacacaatgcagaagctcaggatatttttggcaaaaacctgaatagtctgtttaataatatggaagaattaattaaggatggcagctcaaagcaaaaggccatgctagaagtacataagaccttatttggtaatctgctgtcttccagtgtctctgcattagataccattactacagtagcacttggatctctcacatctattccagaaaatgtgtctactcatgtttctcagatttttaatatgatactaaaagaacaatcattagcagcagaaagtaaaactgtactacaggaattgattaatgtactcaagactgatcttctaagttcactggaaatgattttatccccaactgtggtgtctatactgaaaatcaatagtcaactaaagcatattttcaagacttcattgacagtggccgataagatagaagatcaaaaaaaggaactagatggctttctcagtatactgtgtaacaatctacatgaactacaagaaaataccatttgttccttggttgagtcacaaaagcaatgtggaaacctaactgaagacctgaagacaataaagcagacccattcccaggaactttgcaagttaatgaatctttggacagagagattctgtgctttggaggaaaagtgtgaaaatatacagaaaccacttagtagtgtccaggaaaatatacagcagaaatctaaggatatagtcaacaaaatgacttttcacagtcaaaaattttgtgctgattctgatggcttctcacaggaactcagaaattttaaccaagaaggtacaaaattggttgaagaatctgtgaaacactctgataaactcaatggcaacctggaaaaaatatctcaagagactgaacagagatgtgaatctctgaacacaagaacagtttatttttctgaacagtgggtatcttccttaaatgaaagggaacaggaacttcacaacttattggaggttgtaagccaatgttgtgaggcttcaagttcagacatcactgagaaatcagatggacgtaaggcagctcatgagaaacagcataacatttttcttgatcagatgactattgatgaagataaattgatagcacaaaatctagaacttaatgaaaccataaaaattggtttgactaagcttaattgctttctggaacaggatctgaaactggatatcccaacaggtacgacaccacagaggaaaagttatttatacccatcaacactggtaagaactgaaccacgtgaacatctccttgatcagctgaaaaggaaacagcctgagctgttaatgatgctaaactgttcagaaaacaacaaagaagagacaattccggatgtggatgtagaagaggcagttctggggcagtatactgaagaacctctaagtcaagagccatctgtagatgctggtgtggattgttcatcaattggcggggttccatttttccagcataaaaaatcacatggaaaagacaaagaaaacagaggcattaacacactggagaggtctaaagtggaagaaactacagagcacttggttacaaagagcagattacctctgcgagcccagatcaacctttaattcacttgggggttggcaattttatttttaaagaaaacttaaaaataaaacctgaaaccccagaacttgagccttgtgtatagattttaaaagaatatatatatcagccgggcgcggtggctcatgcctgtaatcccagcactttgggaggctgaggcgggtggattgcttgagcccaggagtttgagaccagcctggccaacgtggcaaaacctcgtctctgttaaaaattagccgggcgtggtggcacactcctgtaatcccagctactggggaggctgaggcacgagaatcacttgaacccaggaagcggggttgcagtgagccaaaggtacaccactacactccagcctgggcaacagagcaagactcggtctcaaaaacaaaatttaaaaaagatataaggcagtactgtaaattcagttgaattttgatatctacccatttttctgtcatccctatagttcactttgtattaaattgggtttcatttgggatttgcaatgtaaatacgtatttctagttttcatataaagtagttcttttataacaaatgaaaagtatttttcttgtatattattaagtaatgaatatataagaactgtactcttctcagcttgagcttaacataggtaaatatcaccaacatctgtccttagaaaggaccatctcatgttttttttcttgctatgacttgtgtattttcttgcatcctccctagacttccctatttcgctttctcctcggctcactttctccctttttatttttcaccaaaccatttgtagagctacaaaacctatcctttcttattttcagtagtcagaattttatctagaaatcttttaacacctttttagtggttatttctaaaatcactgtcaacaataaatctaaccctagttgtatccctcctttaagtatttaaaacttgttgccccaaatgtgaaagcatttaattcctttaagaggcctaactcattcaccctgacagagttcacaaaaagcccactttagagtatacattgctattatgggagaccacccagacatctgactaatggctctgtgccacactccaagacctgtgccttttagagaagctcacaatgatttaaggactgtttgaaacttccaattatgtctataatttatattcttttgtttacatgatgaaactttttgttgttgcttgtttgtatataatacaatgtgtacatgtatctttttctcgattcaaatcttaacccttaggactctggtatttttgatctggcaaccatatttctggaagttgagatgtttcagcttgaagaaccaaaacagaaggaatatgtacaaagaataaattttctgctcacgatgagtttagtgtgtaaagtttagagacatctgactttgatagctaaattaaaccaaaccctattgaagaattgaatatatgctacttcaagaaactaaattgatctcgtagaattatcttaataaaataatggctataatttctctgcaaaatcagatgtcagcataagcgatggataatacctaataaactgccctcagtaaatccatggttaataaatgtggtttctacatt

SEQ ID NO: 227 - protein, 1663 aa, Homo sapiens
MTDRFWDQWYLWYLRLLRLLDRGSFRNDGLKASDVLPILKEKVAFVSGGRDKRGGPILTFPARSNHDRIRQEDLRKLVTYLASVPSEDVCKRGFTVIIDMRGSKWDLIKPLLKTLQEAFPAEIHVALIIKPDNFWQKQKTNFGSSKFIFETSMVSVEGLTKLVDPSQLTEEFDGSLDYNHEEWIELRLSLEEFFNSAVHLLSRLEDLQEMLARKEFPVDVEGSRRLIDEHTQLKKKVLKAPVEELDREGQRLLQCIRCSDGFSGRNCIPGSADFQSLVPKITSLLDKLHSTRQHLHQMWHVRKLKLDQCFQLRLFEQDAEKMFDWISHNKELFLQSHTEIGVSYQYALDLQTQHNHFAMNSMNAYVNINRIMSVASRLSEAGHYASQQIKQISTQLDQEWKSFAAALDERSTILAMSAVFHQKAEQFLSGVDAWCKMCSEGGLPSEMQDLELAIHHHQTLYEQVTQAYTEVSQDGKALLDVLQRPLSPGNSESLTATANYSKAVHQVLDVVHEVLHHQRRLESIWQHRKVRLHQRLQLCVFQQDVQQVLDWIENHGEAFLSKHTGVGKSLHRARALQKRHDDFEEVAQNTYTNADKLLEAAEQLAQTGECDPEEIYKAARHLEVRIQDFVRRVEQRKLLLDMSVSFHTHTKELWTWMEDLQKEMLEDVCADSVDAVQELIKQFQQQQTATLDATLNVIKEGEDLIQQLRSAPPSLGEPSEARDSAVSNNKTPHSSSISHIESVLQQLDDAQVQMEELFHERKIKLDIFLQLRIFEQYTIEVTAELDAWNEDLLRQMNDFNTEDLTLAEQRLQRHTERKLAMNNMTFEVIQQGQDLHQYITEVQASGIELICEKDIDLAAQVQELLEFLHEKQHELELNAEQTHKRLEQCLQLRHLQAEVKQVLGWIRNGESMLNASLVNASSLSEAEQLQREHEQFQLAIESLFHATSLQKTHQSALQVQQKAEVLLQAGHYDADAIRECAEKVALHWQQLMLKMEDRLKLVNASVAFYKTSEQVCSVLESLEQEYRRDEDWCGGRDKLGPAAEIDHVIPLISKHLEQKEAFLKACTLARRNAEVFLKYIHRNNVSMPSVASHTRGPEQQVKAILSELLQRENRVLHFWTLKKRRLDQCQQYVVFERSAKQALDWIQETGEFYLSTHTSTGETTEETQELLKEYGEFRVPAKQTKEKVKLLIQLADSFVEKGHIHATEIRKWVTTVDKHYRDFSLRMGKYRYSLEKALGVNTEDNKDLELDIIPASLSDREVKLRDANHEVNEEKRKSARKKEFIMAELLQTEKAYVRDLHECLETYLWEMTSGVEEIPPGILNKEHIIFGNIQEIYDFHNNIFLKELEKYEQLPEDVGHCFVTWADKFQMYVTYCKNKPDSNQLILEHAGTFFDEIQQRHGLANSISSYLIKPVQRITKYQLLLKELLTCCEEGKGELKDGLEVMLSVPKKANDAMHVSMLEGFDENLDVQGELILQDAFQVWDPKSLIRKGRERHLFLFEISLVFSKEIKDSSGHTKYVYKNKLLTSELGVTEHVEGDPCKFALWSGRTPSSDNKTVLKASNIETKQEWIKNIREVIQERIIHLKGALKEPLQLPKTPAKQRNNSKRDGVEDIDSQGDGSSQPDTISIASRTSQNTVDSDKDGNLVPRWHLGPGDPFSTYV

SEQ ID NO: 228 - DNA, 6469 bp, Homo sapiens
tgcgagcccagcgtcaagtgattccggcctcctcgagacagcggtggtgggatgaggctctgccgaggggactggctgtgaaggatgagttcagggtgggatgacggaccgcttctgggaccagtggtatctctggtatctccgcttgctccggctgctggatcgagggtcttttcggaatgatggtttgaaagcttctgatgtccttcctatcctaaaggaaaaggtggccttcgtgtctgggggtcgtgataagcgaggcggacccatcctgaccttccctgctcgcagcaatcatgacagaataagacaggaagacctgcggaaactcgtgacgtatttggccagcgtgccaagtgaggacgtgtgcaaacgtggcttcactgtcatcatcgacatgcggggctccaagtgggacctcatcaagcccctcctcaaaacgctgcaggaagcctttccagctgagatccatgtggccctcatcattaaacccgacaacttctggcagaaacagaagaccaactttggcagctccaaattcatctttgagacgagcatggtatctgtggagggcctcacaaagctggtggacccctcccagctgacggaggagtttgatggctccctggactacaaccatgaggagtggatcgaactgcggctctccctggaggagttcttcaacagcgccgtgcacctgctctcgcgcctcgaggacctccaggagatgctagcccggaaggagtttcctgtggatgtggagggctctcggcggctcattgacgaacacacacagctcaagaaaaaggtgctgaaggcccctgtggaggagctggaccgggaggggcagcggctgctgcagtgcatccgctgcagcgacggcttctcaggacgcaactgcatcccgggcagtgctgacttccagagcctggtgcccaagatcaccagtctcctggacaagctgcactccacccggcagcacctgcaccagatgtggcacgtgcgcaagctcaagctggaccagtgctttcagctgcggctcttcgagcaggatgctgagaagatgtttgactggataagccacaacaaggagttattcctccagagccacacggagatcggagtcagctaccagtacgcccttgacctccagacgcagcacaatcactttgccatgaactccatgaatgcctatgtcaacatcaaccgcatcatgtccgtggcttcccgcctctctgaggccggtcattatgcctcacaacaaatcaagcagatctccacccagctggaccaggagtggaagagctttgctgctgccctggatgaacgcagcaccatcctcgccatgtctgctgtgttccaccagaaggctgagcagttcctgtcgggagtggatgcctggtgcaagatgtgcagtgaaggtggtctgccatccgagatgcaagacctagagctggcaatccaccaccaccagaccttgtatgagcaggtgacccaagcctacacagaggtcagccaggatggcaaagcactacttgatgtgctgcagcggcccctgagccctgggaactccgaatccctcacggccacagccaactactccaaggcagtgcaccaggtgctggacgtggtgcatgaggtgttacatcaccagcgacggctggagagcatctggcagcaccgcaaggtgcggctccaccagcggctgcagctctgcgtcttccagcaggatgtacagcaggtgttggactggattgaaaaccatggtgaggcctttctcagcaaacacactggagttgggaagtccctacatcgagcccgggccctgcagaagaggcatgatgactttgaagaggtggctcagaatacgtacaccaatgcggacaagctcctagaagcagcagagcagttggctcagacgggggaatgtgaccccgaggagatctacaaggcagctcgacacctggaggtgcgcatccaagacttcgtgcgcagggtggagcagcggaagcttctcctggacatgtctgtttccttccacacacacaccaaagagttgtggacatggatggaagaccttcagaaggagatgttggaggatgtctgtgcagattctgtggatgcagtccaggaactgatcaaacagttccagcagcagcagaccgccactctagatgccacactcaatgtcatcaaggaaggcgaagaccttatccagcagctcaggtcagcgcctccctccctcggggagcccagcgaggccagggactcggctgtgtccaacaacaaaacaccccacagcagctccatcagccacatcgagtcggtcctgcagcagcttgatgatgcccaggtgcagatggaggagctgttccacgagcggaagatcaagctggacatcttcctgcaactgcgcatctttgagcagtacaccatcgaggtgacagcagagctagacgcctggaatgaagacttgcttcggcagatgaatgacttcaacacagaggacctaaccctggcagaacagcggctgcagcgccacacagaacggaagctagccatgaacaacatgacctttgaggttatccagcagggacaggatctgcaccagtacatcacggaggtccaggcatcaggaattgagttgatctgtgaaaaagacattgatctggcagcccaggtgcaagagttattggaatttctccatgagaagcagcatgaattggagctcaatgcagagcagactcataagcggctagagcagtgcctccaattacgtcacctccaggctgaagtcaaacaggttctgggatggatccgcaatggagagtcaatgctcaacgccagcctggtcaatgccagctctttgtcggaagcagagcagctgcagcgggagcacgagcagttccaactggccatcgagtccctctttcatgccacttccttgcagaagacgcaccagagtgccctgcaggtacagcagaaagccgaggtgctgctccaggccggccactacgatgccgatgccatccgggaatgtgctgagaaggtggccctccactggcagcagctcatgctgaagatggaagaccggctaaaattggtcaatgcctctgtggccttttacaaaacttctgaacaggtgtgtagtgtcctggagagcttagagcaagaataccggagagatgaggactggtgtggtggacgagataagctggggccagcagcagagatcgaccatgtcattcccctcatcagcaaacatttggaacaaaaggaggcctttcttaaggcctgcaccctggctcggcggaatgctgaggtgtttctcaagtacatccacaggaacaacgtcagcatgcccagtgtcgccagccacactcggggacccgagcaacaagtgaaagccatcctgagtgagctcctgcagagggagaatcgcgtgctgcatttctggaccttgaagaagcggcggttagaccaatgccagcaatatgtggtgttcgagcgcagcgctaagcaggcgcttgactggatccaagaaacaggtgaattttacctctcaacacatacctccactggagagaccacagaggagactcaggaactgctgaaagaatatggggaattcagggtgcctgccaagcaaacaaaggagaaggtgaagcttctgattcagctggccgatagctttgtggaaaaaggccacattcatgccacggagataaggaaatgggtgaccacggtggacaagcactacagagatttctccctgaggatgggaaagtaccgatactcactggagaaagccctaggagtcaacacagaggataataaggacctggagctggatattatcccagcaagcctttcggatcgggaggtcaagctgcgggacgccaaccacgaagtcaatgaagagaagcggaagtcagcccggaagaaagaatttattatggctgaactactccagacagagaaggcttatgtaagggatttgcatgagtgcttagagacctacctgtgggaaatgaccagtggtgtggaggagatcccccctgggatcctcaataaagagcatatcatctttggcaacatccaagagatctacgatttccataacaacatcttcctcaaagagctggagaagtacgagcaactgcctgaggatgtgggacactgctttgttacctgggcagacaaatttcagatgtatgtcacctactgtaaaaacaagcctgattccaaccagcttatcctggagcatgcgggcaccttctttgatgagatacaacagcggcatggtctggccaactccatctcttcctacctaattaagcctgtccaaaggatcaccaaatatcaactgctcctgaaggaacttttaacttgctgtgaagaagggaaaggggagctcaaggatggcctggaggtgatgctcagtgtcccaaagaaagccaatgatgccatgcatgtcagcatgctggaagggttcgacgagaacctggatgtgcagggggagttgattctccaggatgcctttcaagtgtgggacccgaagtcgctgatccggaaggggcgggagcggcacttgttcctctttgagatctccttggtttttagcaaggagatcaaagattcttcaggacacacgaaatatgtttacaagaacaagctactgacctcagagctgggtgtgaccgagcacgtggagggcgatccctgcaaattcgccttgtggtctgggcgcaccccatcctcagacaataaaacagtgctgaaagcctccaacattgaaaccaagcaggagtggatcaagaacattcgagaagtgattcaagaaaggatcattcacctgaaaggagctttaaaggagccacttcagctccccaaaacaccagccaaacagaggaacaatagtaagagggatggagtggaggatattgacagccagggggatgggagcagccaaccagacaccatctccattgcttctaggacctctcagaacacagtggacagtgacaaggatggcaaccttgttcctcggtggcacctgggacctggagatcctttctccacttacgtttagcgcgcatcctgggacttgtccctgcagctcaccgggttagccgtggcaccgttgggacctcccaccaggactccaatcacccacctctcttgagacttctctggcagggctggtgtggggtgcagcctttgctcagagggcaacatgttccaagcaaaatctccccgcctgggccatgggctcaccctcggggctcccttcttctctactgggtgcaattcgaggttgctgagcttctctccaaagtctaaaatggtggggcagtagggacctgtgagaggcccaatggcccaatgtacttcccccagatcccactcagaacagcaggtacgcccaggctcctgctgccctagaggtctgcaacatgagtgaagaggttaattagagggacacacttatctctgaagtttttctccaggctgaacatttctattatcagtggcccctaatctggaaaaacccatcattctaatctagcttgtatccccacatcatgagaaagagggaagaagaagaagggatgatgtgtggtagagaagatgagggttaactttagcctttcccaaacactggcaacaaccacttcctcaacaatttttctatttgcttcagcctactcagattttttcaggtttttctagctcctccataacctcactccctcccgaggtctctggttcaaagaccaccctaccagcccctatttgcttcaggttatcctgttgagggtgggtgggaagagtgagaagatataaatgaaaaactggccacatgttgataattgttgaaactagatgatggtacgtggacattcattataccattctccccacttctgtatttgtttgcaatttttcataataaaaaagttttaaaagtcctccagtttccaacacactcaagagagagccccaaccccaaacacagagtttcatggaaaccccacaccaaggcaagaggcagagatgatgattccatttcatatatacactcattttctaactttttttaaaggcccactgctttattttcaatagattaaacctgatttctgagaggtcctgaagttgggcttatttccctggctgggttatgggggagggcagggtaaagggatccttaaaaaagtttacacttctatgtatctcacaatcttattgtgaggatgtgacttgttcagtgttctgaacttttcgaaggaatcgtgctctcaatgcaaagtgtcattctctggaattgcacctggctcaggaaaggactgtctttgtacttgaatttaaatccaatggagaactttaacacgggcatttgcatgactgagaattgctgctgtcttttttccgtatgtcactttcttgaatgtgttctaataaaatg

SEQ ID NO: 229 - protein, 165 aa, Homo sapiens
MAPNASCLCVHVRSEEWDLMTFDANPYDSVKKIKEHVRSKTKVPVQDQVLLLGSKILKPRRSLSSYGIDKEKTIHLTLKVVKPSDEELPLFLVESGDEAKRHLLQVRRSSSVAQVKAMIETKTGIIPETQIVTCNGKRLEDGKMMADYGIRKGNLLFLASYCIGG

SEQ ID NO: 230 - DNA, 777 bp, Homo sapiens
ggccccttgtctgcagagatggctcccaatgcttcctgcctctgtgtgcatgtccgttccgaggaatgggatttaatgacctttgatgccaacccatatgacagcgtgaaaaaaatcaaagaacatgtccggtctaagaccaaggttcctgtgcaggaccaggttcttttgctgggctccaagatcttaaagccacggagaagcctctcatcttatggcattgacaaagagaagaccatccaccttaccctgaaagtggtgaagcccagtgatgaggagctgcccttgtttcttgtggagtcaggtgatgaggcaaagaggcacctcctccaggtgcgaaggtccagctcagtggcacaagtgaaagcaatgatcgagactaagacgggtataatccctgagacccagattgtgacttgcaatggaaagagactggaagatgggaagatgatggcagattacggcatcagaaagggcaacttactcttcctggcatcttattgtattggagggtgaccaccctggggatggggtgttggcaggggtcaaaaagcttatttcttttaatctcttactcaacgaacacatcttctgatgatttcccaaaattaatgagaatgagatgagtagagtaagatttgggtgggatgggtaggatgaagtatattgcccaactctatgtttctttgattctaacacaattaattaagtgacatgatttttactaatgtattactgagactagtaaataaatttttaaggcaaaatagagcattc

SEQ ID NO: 231 - protein, 252 aa, Homo sapiens
MAQLCGLRRSRAFLALLGSLLLSGVLAADRERSIHDFCLVSKVVGRCRASMPRWWYNVTDGSCQLFVYGGCDGNSNNYLTKEECLKKCATVTENATGDLATSRNAADSSVPSAPRRQDSEDHSSDMFNYEEYCTANAVTGPCRASFPRWYFDVERNSCNNFIYGGCRGNKNSYRSEEACMLRCFRQQENPPLPLGSKVVVLAGLFVMVLILFLGASMVYLIRVARRNQERALRTVWSSGDDKEQLVKNTYVL

SEQ ID NO: 232 - DNA, 1544 bp, Homo sapiens
  misc_feature (1358)..(1358): n = a, c, g, or t
gcacgagttgggaggtgtagcgcggctctgaacgcgctgagggccgttgagtgtcgcaggcggcgagggcgcgagtgaggagcagacccaggcatcgcgcgccgagaaggccgggcgtccccacactgaaggtccggaaaggcgacttccgggggctttggcacctggcggaccctcccggagcgtcggcacctgaacgcgaggcgctccattgcgcgtgcgcgttgaggggcttcccgcacctgatcgcgagaccccaacggctggtggcgtcgcctgcgcgtctcggctgagctggccatggcgcagctgtgcgggctgaggcggagccgggcgtttctcgccctgctgggatcgctgctcctctctggggtcctggcggccgaccgagaacgcagcatccacgacttctgcctggtgtcgaaggtggtgggcagatgccgggcctccatgcctaggtggtggtacaatgtcactgacggatcctgccagctgtttgtgtatgggggctgtgacggaaacagcaataattacctgaccaaggaggagtgcctcaagaaatgtgccactgtcacagagaatgccacgggtgacctggccaccagcaggaatgcagcggattcctctgtcccaagtgctcccagaaggcaggattctgaagaccactccagcgatatgttcaactatgaagaatactgcaccgccaacgcagtcactgggccttgccgtgcatccttcccacgctggtactttgacgtggagaggaactcctgcaataacttcatctatggaggctgccggggcaataagaacagctaccgctctgaggaggcctgcatgctccgctgcttccgccagcaggagaatcctcccctgccccttggctcaaaggtggtggttctggcggggctgttcgtgatggtgttgatcctcttcctgggagcctccatggtctacctgatccgggtggcacggaggaaccaggagcgtgccctgcgcaccgtctggagctccggagatgacaaggagcagctggtgaagaacacatatgtcctgtgaccgccctgtcgccaagaggactggggaagggaggggagactatgtgtgagctttttttaaatagagggattgactcggatttgagtgatcattagggctgaggtctgtttctctgggaggtaggacggctgcttcctggtctggcagggatgggtttgctttggaaatcctctaggaggctcctcctcgcatggcctgcagtctggcagcagccccgagttgtttcctcgctgatcgatttctttcctccaggtagagttttctttgcttatgttgaattccattgcctccttttctcnatcacagaagtgatgttggaatcgtttcttttgtttgtctgatttatggtttttttaagtataaacaaaagttttttattagcattctgaaagaaggaaagtaaaatgtacaagtttaataaaaaggggccttcccctttagaataaatttccagcatgttgctttcaaaaaaaaaaaaaaaaaaa

SEQ ID NO: 233 - protein, 512 aa, Homo sapiens [sequence omitted]

SEQ ID NO: 234 - DNA, 2602 bp, Homo sapiens
ctcaccctgaaggtgacagttccttggaaccttccctgatccttgtgatcccaggctccaagagtccacccttcccagctcagctcagtacctcagccacctccaagatccctacactgatcatgcttttcccaatctccatgtcggccacggagtttcttctggcctctgtcatcttctgtctggtattctgggtaatcagggcctcaagacctcaggtccccaaaggcctgaagaatccaccagggccatggggctggcctctgattgggcacatgctgaccctgggaaagaacccgcacctggcactgtcaaggatgagccagcagtatggggacgtgctgcagatccgaattggctccacacccgtggtggtgctgagcggcctggacaccatccggcaggccctggtgcggcagggcgatgatttcaagggccggcccgacctctacaccttcaccctcatcagtaatggtcagagcatgtccttcagcccagactctggaccagtgtgggctgcccgccggcgcctggcccagaatggcctgaaaagtttctccattgcctctgacccagcctcctcaacctcctgctacctggaagagcatgtgagcaaggaggctgaggtcctgataagcacgttgcaggagctgatggcagggcctgggcactttaacccctacaggtatgtggtggtatcagtgaccaatgtcatctgtgccatttgctttggccggcgctatgaccacaaccaccaagaactgcttagcctagtcaacctgaataataatttcggggaggtggttggctctggaaacccagctgacttcatccctattcttcgctacctacccaacccttccctgaatgccttcaaggacctgaatgagaagttctacagcttcatgcagaagatggtcaaggagcactacaaaacctttgagaagggccacatccgggacatcacagacagcctgattgagcactgtcaggagaagcagctggatgagaacgccaatgtccagctgtcagatgagaagatcattaacatcgtcttggacctctttggagctgggtttgacacagtcacaactgctatctcctggagcctcatgtatttggtgatgaaccccagggtacagagaaagatccaagaggagctagacacagtgattggcaggtcacggcggccccggctctctgacagatcccatctgccctatatggaggccttcatcctggagaccttccgacactcttccttcgtccccttcaccatcccccacagcacaacaagagacacaagtttgaaaggcttttacatccccaaggggcgttgtgtctttgtaaaccagtggcagatcaaccatgaccagaagctatgggtcaacccatctgagttcctacctgaacggtttctcacccctgatggtgctatcgacaaggtgttaagtgagaaggtgattatctttggcatgggcaagcggaagtgtatcggtgagaccattgcccgctgggaggtctttctcttcctggctatcctgctgcaacgggtggaattcagcgtgccactgggcgtgaaggtggacatgacccccatctatgggctaaccatgaagcatgcctgctgtgagcacttccaaatgcagctgcgctcttaggtgcttgagagccctgaggcctagactctgtctacctggtctggttgggcagccagaccagcaggctggcctatgtggtctaagattcagcctgaaactcatagacactgatctggctgcagttttgctatctgggctgtgggcaagcctaagggatcctgcctgcccctaccctggacttgcctctgcacaccctccagagacaacaggtaaaacagggccacatagatgctgatggagccttcccaagttgtgcttgagccaggaggcctgctagggttaggaggtccttaggcctctgagaagctctgaagaactctctggaagcccctgggcccagtacctagctggctctgtgagggtgctgactggcttcagcaagttagaactagccaaaccaggaccctgtccaatctttgacaattgggagctgccaagagtgaagggaagagacagcccaggatactggcacagaggtagtctcactgcttgaactaggctgagcaatctgaccctatgggtctaggacacagttcctgggaacatcacattcctctgcccttcctgcaggcaggaacaaacagggctgccttctggccttgtaagacccttattgctgtcctggaggggctggggacttgtgtctgcggggatccagagcgcacagggagtgcacatatccaggcaccaggactagggctggagtgaggggggggtatttcaattaccttctattggtctcccttctctacactcttgtaataaaatgtctatttttaatgtttgtacacaacaatccttctattctagcctgcattgagcttgcatgcttgcataagagcttaagaaccattgatttaatgtaatagggaaaattctaacccaggtatccaaaaatgtgtaagaacaactacctgagctaaataaagatattgttcaga

SEQ ID NO: 235 - protein, 411 aa, Homo sapiens
METPEVPVGSLIDFGPEAPTSSPLEAPPPVLQDGDGSLGDGASESETTESADSENDMGESPSHPSWDQDRRSSSNESFSSNQSTESTQDEETLALRDFMRGYVEKIFSGGEDLDQEEKAKFGEYCSSENGKGREWFARYVSAQRCNSKCVSEATFYRLVQSFAVVLFECHQMDDFGPAKNLMTMCFTYYHIGKPQLLPPESREKPAGSIDSYLKSANSWLAEKKDIAERLLKNTSARTENVKGFFGGLETKLKGPLARRNEEDENKPQEKRPRAVTAYSPEDEKKGEKIYLYTHLKQQPIWHTLRFWNAAFFDAVHCERTKRSPTTRGDAGEEEEKREKWCHMTQEERDDSLRFNENITFGQLGTFTHNMLAFGLNKKLCNDFLKKQAVIGNLDEEQYKLLSDHIEQMATE

SEQ ID NO: 236 - DNA, 7758 bp, Homo sapiens
caagagtgcctgaggctggatcagaaatagccacgatcgtccagtttgattgattgattgattgatttagttgtgatggagtctcgctgtatttcccaggctggagtgcagaggcacgatctccgttcactgcagcctccacctccccggttcaagtgattctcctgcctcagccttccgagtagctgggattacaggcacctgccaccacgcccggctgatttttgtgtttttagtagagacagggtttcgccatgttggccaggctggtcttgaactcctgacctcaggtgagccacccgcctcggcctcccaaagtgttgggattacaggcgtgagccactgcccccagccccagcttgatcttgaacctcctgtgtgtgggcagagagacatggccctgctactgcttgaacggcttccggagacagtgacttgtttcctttttccctctgaactatgccgtagggccaggtgagctgctgtgaaggactcattcttggtagccggcagttactggcaacttgtgagcttggtgggctcctactaacgcacctgggacaccaggctgctgggctcccctctaggcagcctcccctccaggcagcctcaccagcagctcccctgagccatggagaccccagaggtccccgtgggctcgctaatcgactttgggcctgaggcacccacctcttctcccctggaggcaccaccccctgtgctgcaggacggcgatggctccctgggggacggtgcatcagagagtgagaccactgagtctgcggacagtgagaatgacatgggcgagtcgccctcgcacccgtcctgggaccaagaccgccgttcctcctccaacgagtccttctcctccaaccagagcaccgagtctacccaggatgaagagaccctggcactcagggacttcatgcgtggctacgtggagaagatcttctctggaggggaggacttggatcaggaggagaaagccaagtttggagagtactgcagcagtgaaaatggaaaaggccgggagtggtttgctcgatacgtgagtgcccagcgctgcaactccaagtgtgtctcagaggcaaccttctaccgcctggtgcagtcttttgcagtggtgctgttcgagtgtcatcagatggatgactttgggcctgccaagaacctcatgaccatgtgcttcacctactaccacatcggaaaaccacagctgctgcccccggagtcccgggagaagcccgcgggcagcatcgactcctacctgaaatccgcaaacagctggctggccgaaaagaaggacatcgccgagcggctgctgaagaacacctcggccaggactgagaatgtcaagggcttcttcggggggctggagaccaagctgaaggggcccctggccaggaggaacgaggaagacgagaacaaaccccaggagaagcggcccagggctgtgaccgcgtacagccccgaggacgaaaagaagggggagaagatctacctgtacacgcacctgaagcaacagcccatctggcacactctgaggttctggaatgcagccttttttgacgctgtccattgtgagaggacaaagcgatctcccactaccagaggggatgctggagaggaggaggagaagagggagaagtggtgccacatgacccaggaggagcgcgacgacagcctccggttcaacgagaacatcaccttcgggcagctgggcacattcacgcacaacatgctggcctttggactgaacaagaagctgtgcaatgacttcctgaagaagcaggctgtgattggcaacctggatgaagagcaatacaagctgcttagtgaccacattgagcaaatggccactgagtaggccccagaggtcgcactccgcaggaggactgaggccatgtgccattctcccgggcccagcgcccggccgtcaccccacccgatgacctgcatgaagccagcagcacccagagccactcctgctgccctagaactagcggttagaagaatccgctgttcctccctcatctcctctgcctgtgtctgcgacccccatccatgtgccaaagtgtcccttgggtcacacagctaaagccgaggtgaccagttgtaccccgagtgccaggcttgtgagatgagaccaagagggaggaggggaaggactccatgggccatcgtgggccaagggctggcgagggtgggggtgggcaagggatgcaggcaggacagccatgaggtggggctgcagccggcacacccagtggtggagggccggcgctgccactcacggtgggtggccgtgggccaccttccctgcaatgggtgcacacgcggctcccatccagccctctcagcgtggggctgtggctggtcctcactattccccagtctcccgctgtggggcaggaacaggaagtgacgggaaccttgaggaggaaacgcctgtgttagggagagagtgggtgcggtgtagaggatgctcttggccggctggagcaagacctggctcccaccagagggacgtgtgtgtgcctgcagacggcccgggagctgtgtgtctccgccagagtcacagcagtgccgaggtgtccgcggcagaccacacagaccgtctgaaatgcgcccgcctggcggacagctcccttctgaagcagagaagcctccatggtcacgaagcagcgttgtgctgtgtgtccctcgcaagaagcacaggaaagagaagtttctttagtagccactagacaaccaccctttctgaaagcaaacagtgctgctctttattccagacaaggcaggaaagtctgagttgggagtgacagtggctggagagaagcagatctgtgcaacgtgcagggcaagccagtggcgtggcctctgcctctaagcgctgagcattgggccccttccccaccagacctttgtagctcctccagcctctgcagagactcccttcacctcgcacttactgcctgggaaccacggcccttctcttctgtgggtctgcaccaggtactccaggccagcccatgggcccggggcctgaccccaacacctgcatgctgggtccagagccttctgtttcaccgtgcgtggacactgctaggccgcctggggtcccctgcctcctgcctgtcgctgccgtggtccctgactgcgaaataggcccgcggggctctccctcctcctgccatcctcccctcccgcccttcctggctacctcctctgacatgcggtcagataagtcccgtcttgtttgtgagtaccacagaaacgcctgagagtcacttacccggccactgcttggaaggtttccctccggggaatgcctccctggaatgttccagagacggaacattctctagagacaacagtctgtgctgcagattggttggatcacagaatgtgtgtctggggcattatctgaaacgtggtgtcatctgatgcatttggaccatatgctgccagactgcagaacgggggagccggggctcagggcccctgactgcatggtgcatgagtgatctcagcctagcgatgccgctggccagaccgtgaccatgctgccagtgtgctcgccatgagctgggtcagggctggggagttgtgcaggctggggtgacccttcccccatcattgggccccaacgggcatgtctccaccgaatccatttagagaaatgtcagagcgaggggtgtgtggacacccctcgctctgatgccaactgcagataatacacacctcctgcagcgtccagccacggctccagggcactgctctcctccttgcaccggtgaaactcaggccacactcaagggctgactgtccaggcgctcccttcagccgcctcgtcgtcagcgttcttagtcatgcattattcgtgttagctgaaatgcattcagactttgttctgcggtgcccacaggacttacccctgtatgtacaggatttttgtatgaaagttttgtttgattctgagactctcttgggaacgctggagagcttgtgcacagcctctggaaggaaaggcagcgctgacttcgttgggcttttttccaagcactttaacttcagaaatggtcttgacacttttttctccacatagactcttgaaatagccatttcaggggaggaaagggttggggttttctttgtttgtttgtttgtttccccctttactacctgttcttgtagatctagctcctcagagttggaggaaggctgacagagaaggtctcctctgtgctccatccacacaggatgccggagagacagccccttgtgctgtgagcagagcaggcagtggctctggaggctgcctgtggtctccttccagctgtggctgacagtggctctggccagggttgcttggagaaggctcagtgtgcctgggacagggcttaccacctgccaccaaggtttcctctcttcccccaggacctgggcagagcaggcatgagctgggctgtggtgcagagcaagcagacccagccacactgctcaaaggtccctgcgtggggaggtgtcacaccaggggcacacccagggccacctgggtgtaggagagctctggtggcccctccgtaaactcaggaagtgtcaggtgatttcctagggagaggttcccagtcccagcaggcagaatgcccaaaaccaggagcacgaaggcctgtcatccatggggccattgcaggcaccctgccgcccgaccttgagggctgtgccaatcctagtgaaccaaaatgcaaacaactcacacaagtgaaaagctccctgctttgaaaacaggacatgttgacaggcagcatggtatgtttttagcctttgttacagttttagcaacattgatgtctaagaggggccgtggtaatagattgcatctgccctgtgcatgcgcatgtttaaccacaggccagagaactcaattctgatgtcgtaagttctctgtaagtgaaatggggtagactgtatgattttcctattgccaaaagaaagaaagggggccaaacagctctgaaatttccaaaaaatggctagagggagagtccagtttctgagctctgtacccaaattaaaatcctgatgttcaggttaatccaagcaacacgcattgggtttaaaaccagcaccgaggcccagtgggggaatcacagacatcaccaagtctcgtcttctttccttcctgtgagttgaaaccaaacaggcctctcgctcactcctcccagcccagtaatgctgaggagttcagttgtgaggaaagaaggctggagctgtgagattcgcttttccctaggctgttccgcgtgggttaccttatcaccctggagcacttggtattccagacccctgacatgaggaatgcaggttcacactgtaaagagtttgtgaaaggtttcagtctaactggggttccttagctggaagccagggctggaagctacaggcctgaccttcctgggtcccactatctgttggcattttttttttttttttttagacggagttttgctcttgttgcccaggctggagtgcagtgacacaatctctactcactgcaacctccacctcccgggttcaagcaattctcctgcctcagcctcctgagtagctgggatgacaggtgcacgccaccacgcccggctaatttttatatttttggtagagatggggtttcaccatgctggccaggctggtctcgaactcctgacctcaggtgatcccccccacctcagcctcccaaagtgctgggattacaggcgtgaggcatcacacctgcctctgttggctttttagttaggaaggatccagctaggcccgtgtggttagatcagctttgttactgaattacctaaaaccagaccacagcacagccagggagcccagtagtgtttccaagaacagtgtggagcttgagaaagagaactttaaaaattagagggtccctttctgcagaggaagggatgctcgcagggtggcagtggcccagccccagcctcagggacggggagggagagccccctctgggcccagcaggcaggtgttctgaggctggtccctcctcagtttccgcagccacaaggcgaaacggccagattctcactcaaggtcgttctcactccttttcctgtcccgtttccagtcccactgagccattcacttctgctgaaccatttttcttaggatgcagccgtctcactcccttgtcctgtaaatcgtgtattcatgttgatgattcttggagataggtttcactttttcccagctgcgtccacaggaaaggggagtcggatgccagctgcaccccgcctggctcgcacaggctaagaccacagacagagcagggcttcccggagccacacaggccacgcaccccaggaacccttgctgctgcgggccaggaacaggaatgtgttggtgcctgagacaccaaatggaagaagcacatcaagactgttctcctgcggccaacactggcccggaagccgccctccatacaggccctcagggggcctgccttctgcgcctcagtcccccgtgcatccctgggcctgggtatcacatgctctccaggaaagggacggaatcaatcgtgtgaccgatgggctcgcaaggatgggtgccgccgtgggagccctgcctctggtgctggcaagggattgggtttgtgtgggtgtctctagcctgcagagtgcagtgagtgagagtccttgggagcgcggcgctgcctgtagctgcgcctggggatgcacgtggccacgggatttcagtgggacagcgctcccacaggggctgggggtgggggtggggtttcttagttactgttggaaagggaaaaattcaccatatccaaggggagagacgatgggctgggtttgtttactccaacttcccttctacacccctcctgcagaacagtacgatttggggagaacccagctccccactttatctgcagactctgggacctgacaaaacagtcagagcctgagtgcactgcagcctgaactcccttgagcagcgctataagggactttgcactttaaaaaggggatgcctgtcagtaaatcccctgtgcattgactagaactggggggctgcgcccgctccctccttaatcctagatgatttgctcatgaaatagaggtgggggacgaccgcatgcactctgggaggtgcagccctaaggggtggactccagatctccctgcaagagacagcttggcttggctttggctgttggggaggagtccctgccatcccggtgagcctggggctgttgcttagggtcttctgggtggacacgtggagaaagagaaggcaaacgttggaacactaggaaaagctagaaattcagacaacacacatggatccccttaaaacatgtaaatgtgtcagaacacggttgacctgccgccttcttgaacctggtggcccccgttggaactatcagtggcgtctcccatgcacacgccctctgctttctctttcctagactcgcggtgctcacatccagacattaccttgttggtagcccccaagtggcgtgcagtgacaccagtatcttctctgttgcatttttgcaatcttgtgtcccgctcggtgatgttctacaaactctgttttaaggttgagaaagtttcaagggtgaagatctcaaaacagtgctaaaatcaaaggtgtttgctgtgaagaaaaacatgtgtatatattgcaccttgagttgtcagaaggtagaaactgaaataaactaacttt

SEQ ID NO: 237 - protein, 148 aa, Homo sapiens
METGALRRPQLLPLLLLLCGGCPRAGGCNETGMLERLPLCGKAFADMMGKVDVWKWCNLSEFIVYYESFTNCTEMEANVVGCYWPNPLAQGFITGIHRQFFSNCTVDRVHLEDPPDEVLIPLIVIPVVLTVAMAGLVVWRSKRTDTLL

SEQ ID NO: 238 - DNA, 1312 bp, Homo sapiens
gagcgtgacccagctgcggccggccagccatggagactggagcgctgcggcgcccgcaacttctcccgttgctgctgctgctctgcggtgggtgtcccagagcaggcggctgcaacgagacaggcatgttggagaggctgcccctgtgtgggaaggctttcgcagacatgatgggcaaggtggacgtctggaagtggtgcaacctgtccgagttcatcgtgtactatgagagtttcaccaactgcaccgagatggaggccaatgtcgtgggctgctactggcccaaccccctggcccagggcttcatcaccggcatccacaggcagttcttctccaactgcaccgtggacagggtccacttggaggaccccccagacgaggttctcatcccgctgatcgttatacccgtcgttctgactgtcgccatggctggcctggtggtgtggcgcagcaaacgcaccgacacgctgctgtgagggtcccggtgagatggagtgggtcacacctggcaagctggaagaaagttccctggggatgggagatcgggtgggtgctgccaatctccagctactgtggccacaccccacctggtcatgggcagacccctcccttcctgggctgacctgctccctcgaggccagcctgctccctggctgaggctcaggctatccgcccaagctctttgctcattctagggccagtggaggaaaatgtgataaggccagagcttgtgtgctgggcaagaaatcacctgctgcatcctgtgctccgcaggctgggccggaagcctctgcctgcaggtttctatgctgtttcttagcacagaatccagcctagccttagccgcagtctaggccctgcttggactaggactccttgcttgaccccatctctggttcctgccctggctcctgcaccagccccagctcctgcctacatccaggcagaaatataggcaggggctcttggaagacgttccgtgctgtgacctccgagccctcctggtgggaagacagctggaaaggctgggaggagaagggaggggctgggggttcccaggagccatgcgtggcctgcagagtccattccatcatgatgctgtgcccgctatgggctgtgtccatgaccagaggctggagtgggggtgtgttatagcccctcaccgggacttgctgtgcggatggggcctgggcctccttcctacaggggctcctctgtgggtgaggggccctctggaatggcatcccatgagcttgtggcctctatctgctaccatctgtgttttatctgagtaaagttaccttacttctgg

SEQ ID NO: 239 - protein, 700 aa, Homo sapiens
MSRRTRCEDLDELHYQDTDSDVPEQRDSKCKVKWTHEEDEQLRALVRQFGQQDWKFLASHFPNRTDQQCQYRWLRVLNPDLVKGPWTKEEDQKVIELVKKYGTKQWTLIAKHLKGRLGKQCRERWHNHLNPEVKKSCWTEEEDRIICEAHKVLGNRWAEIAKMLPGRTDNAVKNHWNSTIKRKVDTGGFLSESKDCKPPVYLLLELEDKDGLQSAQPTEGQGSLLTNWPSVPPTIKEEENSEEELAAATTSKEQEPIGTDLDAVRTPEPLEEFPKREDQEGSPPETSLPYKWVVEAANLLIPAVGSSLSEALDLIESDPDAWCDLSKFDLPEEPSAEDSINNSLVQLQASHQQQVLPPRQPSALVPSVTEYRLDGHTISDLSRSSRGELIPISPSTEVGGSGIGTPPSVLKRQRKRRVALSPVTENSTSLSFLDSCNSLTPKSTPVKTLPFSPSQFLNFWNKQDTLELESPSLTSTPVCSQKVVVTTPLHRDKTPLHQKHAAFVTPDQKYSMDNTPHTPTPFKNALEKYGPLKPLPQTPHLEEDLKEVLRSEAGIELIIEDDIRPEKQKRKPGLRRSPIKKVRKSLALDIVDEDVKLMMSTLPKSLSLPTTAPSNSSSLTLSGIKEDNSLLNQGFLQAKPEKAAVAQKPRSHFTTPAPMSSAWKTVACGGTRDQLFMQEKARQLLGRLKPSHTSRTLILS

SEQ ID NO: 240 - DNA, 2627 bp, Homo sapiens
gctgacgccttcgagcgcggcccggggcccggagcggccggagcagcccgggtcctgaccccggcccggctcccgctccgggctctgccggcgggcgggcgagcgcggcgcggtccgggccggggggatgtctcggcggacgcgctgcgaggatctggatgagctgcactaccaggacacagattcagatgtgccggagcagagggatagcaagtgcaaggtcaaatggacccatgaggaggacgagcagctgagggccctggtgaggcagtttggacagcaggactggaagttcctggccagccacttccctaaccgcactgaccagcaatgccagtacaggtggctgagagttttgaatccagaccttgtcaaggggccatggaccaaagaggaagaccaaaaagtcatcgagctggttaagaagtatggcacaaagcagtggacactgattgccaagcacctgaagggccggctggggaagcagtgccgtgaacgctggcacaaccacctcaaccctgaggtgaagaagtcttgctggaccgaggaggaggaccgcatcatctgcgaggcccacaaggtgctgggcaaccgctgggccgagatcgccaagatgttgccagggaggacagacaatgctgtgaagaatcactggaactctaccatcaaaaggaaggtggacacaggaggcttcttgagcgagtccaaagactgcaagcccccagtgtacttgctgctggagctcgaggacaaggacggcctccagagtgcccagcccacggaaggccagggaagtcttctgaccaactggccctccgtccctcctaccataaaggaggaggaaaacagtgaggaggaacttgcagcagccaccacatcgaaggaacaggagcccatcggtacagatctggacgcagtgcgaacaccagagcccttggaggaattcccgaagcgtgaggaccaggaaggctccccaccagaaacgagcctgccttacaagtgggtggtggaggcagctaacctcctcatccccgctgtgggttctagcctctctgaagccctggacttgatcgagtcggaccctgatgcttggtgtgacctgagtaaatttgacctccctgaggaaccatctgcagaggacagtatcaacaacagcctagtgcagctgcaagcgtcacatcagcagcaagtcctgccaccccgccagccttccgccctggtgcccagtgtgaccgagtaccgcctggatggccacaccatctcagacctgagccggagcagccggggcgagctgatccccatctcccccagcactgaagtcgggggctctggcattggcacaccgccctctgtgctcaagcggcagaggaagaggcgtgtggctctgtcccctgtcactgagaatagcaccagtctgtccttcctggattcctgtaacagcctcacgcccaagagcacacctgttaagaccctgcccttctcgccctcccagtttctgaacttctggaacaaacaggacacattggagctggagagcccctcgctgacatccaccccagtgtgcagccagaaggtggtggtcaccacaccactgcaccgggacaagacacccctgcaccagaaacatgctgcgtttgtaaccccagatcagaagtactccatggacaacactccccacacgccaaccccgttcaagaacgccctggagaagtacggacccctgaagcccctgccacagaccccgcacctggaggaggacttgaaggaggtgctgcgttctgaggctggcatcgaactcatcatcgaggacgacatcaggcccgagaagcagaagaggaagcctgggctgcggcggagccccatcaagaaagtccggaagtctctggctcttgacattgtggatgaggatgtgaagctgatgatgtccacactgcccaagtctctatccttgccgacaactgccccttcaaactcttccagcctcaccctgtcaggtatcaaagaagacaacagcttgctcaaccagggcttcttgcaggccaagcccgagaaggcagcagtggcccagaagccccgaagccacttcacgacacctgcccctatgtccagtgcctggaagacggtggcctgcggggggaccagggaccagcttttcatgcaggagaaagcccggcagctcctgggccgcctgaagcccagccacacatctcggaccctcatcttgtcctgaggtgttgagggtgtcacgagcccattctcatgtttacaggggttgtgggggcagagggggtctgtgaatctgagagtcattcaggtgacctcctgcagggagccttctgccaccagcccctccccagactctcaggtggaggcaacagggccatgtgctgccctgttgccgagcccagctgtgggcggctcctggtgctaacaacaaagttccacttccaggtctgcctggttccctccccaaggccacagggagctccgtcagcttctcccaagcccacgtcaggcctggcctcatctcagaccctgcttaggatgggggatgtggccaggggtgctcctgtgctcaccctctcttggtgcatttttttggaagaataaaattgcctctctctttg

SEQ ID NO: 241 - protein, 522 aa, Homo sapiens
MVDDKEKNMKCLTFFLMLPETVKNRSKKSSKKANTSSSSSNSSKLPPVCYEIITLKTKKKKMAADIFPRKKPANSSSTSVQQYHQQNLSNNNLIPAPNWQGLYPTIRERNAMMFNNDLMADVHFVVGPPGGTQRLPGHKYVLAVGSSVFHAMFYGELAEDKDEIRIPDVEPAAFLAMLKYIYCDEIDLAADTVLATLYAAKKYIVPHLARACVNFLETSLSAKNACVLLSQSCLFEEPDLTQRCWEVIDAQAELALKSEGFCDIDFQTLESILRRETLNAKEIVVFEAALNWAEVECQRQDLALSIENKRKVLGKALYLIRIPTMALDDFANGAAQSGVLTLNETNDIFLWYTAAKKPELQFVSKARKGLVPQRCHRFQSCAYRSNQWRYRGRCDSIQFAVDKRVFIAGFGLYGSSCGSAEYSAKIELKRQGVVLGQNLSKYFSDGSSNTFPVWFEYPVQIEPDTFYTASVILDGNELSYFGQEGMTEVQCGKVTVQFQCSSDSTNGTGVQGGQIPELIFYA

SEQ ID NO: 242 - DNA, 4856 bp, Homo sapiens
cggactcacgcagctccagcccatcttgctgacctaattcagaaaagaagtgctacagctctgtgcctgtcatctttgcagtgtagcattttcaggtgatctaggaaacagttatttttatgagcaaataagagaaacaggaatcatgatggggatatatttaacagacccagtactggataaaacttaaagccagtttctattcaacatagtgaaaaggtcaccttgcctggctgagaaaagcagcaaaatatcagctttgttggtttcagttaacctcttagcccgggctaatctcttttccttgatgttcaaaccaatttgggatatctaactctaaagagagacacactgtactcatggtagatgacaaggaaaagaacatgaaatgtctcaccttcttcttgatgcttccagagacggtaaagaacaggtccaagaaaagctcaaagaaagcaaataccagcagcagcagtagcaacagcagcaagttgccaccagtttgttatgaaataattaccttgaagactaaaaagaagaagatggctgctgatatattcccccgtaaaaagccagccaactccagcagcaccagcgtccagcagtaccaccagcagaatctcagtaacaacaaccttatcccggccccaaactggcagggtctttatcccaccattagagagagaaatgcgatgatgttcaataatgatttgatggcagatgtacattttgtggttgggccaccaggtgggactcaacggttgccaggacacaaatatgttttagctgttgggagctctgtgttccatgcgatgttttacggagaacttgcagaggacaaagatgaaatccgtataccagatgtcgaacctgctgcttttctcgctatgctgaaatatatctattgtgatgaaattgacttggctgctgacacagtgctggccacactttatgctgccaaaaagtacattgtccctcaccttgccagagcctgtgttaatttcctggagaccagcctgagtgccaagaatgcctgtgtgctcctctcccagagctgcctgttcgaggagccagacctgacccagcgttgctgggaggtgattgatgcccaggctgagttagctctcaagtctgagggattctgcgatattgacttccagacactagaaagtattctccgtagggaaactctgaatgccaaagaaattgtggtttttgaggcagctctcaactgggctgaagtagaatgccaacgacaagatctggcgttgagcattgaaaataaacgcaaggttctaggaaaggcactttacttgatccgcatacccacaatggccctcgatgattttgcaaatggtgctgcacagtccggggtattaactctcaatgagaccaacgacatcttcctctggtatactgcagccaaaaagcctgagcttcagtttgtgagtaaagcccgtaagggccttgtcccccagcgctgtcaccgtttccagtcgtgtgcctatcgaagcaaccaatggcgctatcgtggtcgctgtgacagcatccagtttgcagttgataaaagagtgttcattgctggctttgggctgtatggctccagctgtggttctgcagaatacagtgccaagattgaacttaagcggcagggcgttgtcctggggcagaacttgagcaagtacttctcagatgggtccagcaatacctttcccgtatggtttgaatacccagtgcagatcgagccagacaccttctacacagccagtgtgatactggatggcaatgaactcagctactttggacaagaaggcatgacagaagttcagtgtggcaaagtgactgtccagtttcagtgctcctcagatagcaccaatggcactggggtacagggagggcagatccctgaacttatattctatgcttgaaaactcacttcctgaagcagcttgagctccaaagtgcacatctggttccaacttgcctgatgcttagctcatctgcaaatatgtgatcagtgccggtaatttgtaatgaatgaagcggtaggcaggttctaatttcttttaaccttttaattatgtacaggcaaaaatgcagcattccgcttttaactatctgcttaaaagagctaacgttcttattaaggctttgtggtttttagagttgcatctatgaacctggggagattatgtgctttcccaagcgttccaccaccctctcagttttgtccctctgaagataattttggatcaccttgaatttccttttggacgttatttgatgaacagaaataaattgataacaagagttatttttaaacagaactcctcttaccccccaaaacagataaacctcagtgtacaattttgaaagaagttttgccttgtaatgagtaataatttagaaagtagacagtggttgtgtttggctctcgttttattccttttacatttgttgcttctgggatttaaaaaattactaaattcataagatagttaggtattaaacacttcagaatatcaatgtaaaattggaaaataaggaactgggggcatttgtttaggccatgacttctacaagcagatttcttttcttttagtttagaagacaaaaaatttcaatacagatacttcttttagaagtaaatttttagattttattgtcagtagaaaaaagttaaactcctactaatttaaactaagacagtttaaaaaggaagcctgaaaaagactcatactacaaataatttaattgatggcatataagaatatgcagtttgaaaaagccaaactcttctctccacttagcttttgatccccactgtttgcttatttgtataagtcatactgtgtagaatttctattttctttttccccattaaaagaggaccaaacaattctttatacaaatggagtagcaactagttttgtagcactacatttaatgtaatgagatacctttgttcatttttttaaatttgaaatatactttacctgatccactttgattgtatactatattctttgttaattttaattttgtcctgttcctagactgctagaatctggcccctggccatcttaaagtgccaacatatgcctgcagggtttataaaaaatggcctggagtgacacattttattatacctaatattcactgcatcagtatcacatctagctcccttacttgtccacagataatgtaaacaaaggagggaaaaacttattaaattctccttcgctgctggcttgtactggtttagtgcctgtgtccctggcagtgtccagtgtgttcacttccagttgaagtatccatgtgtttctgggcagcttttctgctcagtgtgatcctgagatggcttccccgccgccacccagagtgtggtccttggccgcctcctgctcctgctctgcaagcctgaaactggcttgtctggagccaggagttagtcctggggtgtgtgtgtgcctgcgcacccatgcgcatgcaagtgtgtttgccagctcaggagctgtctcctctctacctggctagtaagaggtgggacagtaatggtcctcctgctggccccagcaaggcccatgagtgactgccctgacgtattcactgtgcctctgggccacttcttcccctgtagatgtgggcttgttgccttcagccggcttccctgagggaggagaacactggattattggaaatgttttaatcactcttgccattacctacatctattagcatagatgatgaaaagctgttactggtgattatagatgagtatttccaggacaacattctaaaagtacaattatttcttattggggagattacaggtagtttggcaaagcattgaagtacaaaggtacattttcaattaaaaagcacacttctacaaaagatttggtttttaaattatggttacacatttcagtaactcatagctgctgtgcaaattggtagaccttataagaaggcacttgtttgtaagccagagaagaaactttaattgcatcctatcagattgttgaggtgggtgtgatagtcttcaggtgcagtgcgttcattcactaacgctcactgtcagtgcccatgtttgctagctgcctccatgtgactagtgagctgctggtgaaagtcgtgtgaaatcctgtacactgtgtatagaacaatgtaattttatgttaattgttattactttaaaacatatctaccatctgattggctggtaccgagagctgtgggtaaaatttgaaaattgtatttagaataagaaattttacattttaaaccctattgtcctttatgcattttcaatgaaatggaatgaaggctaatatgcttgctttatttacttttgtaatcttggattttgtagcttttaaaactagaaaccattgttctaacaaagcaggcaactttattctataaacacaactttattaagcagaatacactgtagatgcttttccccaacgtatctggctggcagtctttgtcgttgttcattctggggataaaggggaactaggctagcagttctaatgtgacattctttaagcatatcttaaaatagtatttaagtaaatggtctaatttctacataattattgcactgaacttttttgtttattaaggtgtttaaataagctcagctaattcaagacactgtagtcacttgtgcatcagtgtgcttgaatttagtagcttacagcattatttatgaaggaaaaaatacataaatatgaagtacctcatgttgaatgttattgtactgtatttttaatgtaacagtgcagatcttgttagacacatgaatgtgtataatcatgttaaatgcaaataaaactagttcatag

SEQ ID NO: 243 - protein, 181 aa, Homo sapiens
MAGSREVVAMDCEMVGLGPHRESGLARCSLVNVHGAVLYDKFIRPEGEITDYRTRVSGVTPQHMVGATPFAVARLEILQLLKGKLVVGHDLKHDFQALKEDMSGYTIYDTSTDRLLWREAKLDHCRRVSLRVLSERLLHKSIQNSLLGHSSVEDARATMELYQISQRIRARRGLPRLAVSD

SEQ ID NO: 244 - DNA, 983 bp, Homo sapiens
ggcacgaggcctgacatggagcctgccagctccgtcagccctgactcggcccggagctgagctccccacctgccggtagcccaggagatggagcagcccagcccacgtgcccggccttccgcccctgacttcacttgataacaaactagaaactgaaacagggtcgggatgccgatgccggcttggagttagagatgagtcaccgctgagagcagctgcagtagctgagcagtggcagcagagaggcagacgtgagctgagggcgcagaggcaggcagcatctctgagggtccccaaggagcatggctgggagccgtgaggtggtggccatggactgcgagatggtggggctggggccccaccgggagagtggcctggctcgttgcagcctcgtgaacgtccacggtgctgtgctgtacgacaagttcatccggcctgagggagagatcaccgattacagaacccgggtcagcggggtcacccctcagcacatggtgggggccacaccatttgccgtggccaggctagagatcctgcagctcctgaaaggcaagctggtggtgggtcatgacctgaagcacgacttccaggcactgaaagaggacatgagcggctacacaatctacgacacgtccactgacaggctgttgtggcgtgaggccaagctggaccactgcaggcgtgtctccctgcgggtgctgagtgagcgcctcctgcacaagagcatccagaacagcctgcttggacacagctcggtggaagatgcgagggcaacgatggagctctatcaaatctcccagagaatccgagcccgccgagggctgccccgcctggctgtgtcagactgaagccccatccagcccgttccgcagggactagaggctttcggctttttgggacagcaactaccttgcttttggaaaatacatttttaatagtaaagtggctctatattttctctacgcaaaaaaaaaaaaaaaaaa

SEQ ID NO: 245 - protein, 343 aa, Homo sapiens
MNIHRSTPITIARYGRSRNKTQDFEELSSIRSAEPSQSFSPNLGSPSPPETPNLSHCVSCIGKYLLLEPLEGDHVFRAVHLHSGEELVCKVFDISCYQESLAPCFCLSAHSNINQITEIILGETKAYVFFERSYGDMHSFVRTCKKLREEEAARLFYQIASAVAHCHDGGLVLRDLKLRKFIFKDEERTRVKLESLEDAYILRGDDDSLSDKHGCPAYVSPEILNTSGSYSGKAADVWSLGVMLYTMLVGRYPFHDIEPSSLFSKIRRGQFNIPETLSPKAKCLIRSILRREPSERLTSQEILDHPWFSTDFSVSNSAYGAKEVSDQLVPDVNMEENLDPFFN

SEQ ID NO: 246 - DNA, 4221 bp, Homo sapiens
gtcggccgtcccctttaatttttaaatacacggtcccctcttttctctggggggggcaagcaagaaatcaaagaaggaggagacaagccgtcaattttctccaaaacaaaccccaccgggcaatttggtctcggggtagggggagacggggtgattgcaaattattccaggacgagatccagttctccagcgggaaaggggcaaaggaacgccgcgcgttggaagggccagggtacgcagctccccttgcagcgcccgcaggacccccgcaagctcgtgccggcgaaatcggagaccgccgatctgtcctcgttctctcctgcacgtctggctgcattcggaggaagacctggggcgcgagcgagcggcgacagcatgagcctgtgctgacctccgcgcggcgggccgagcccagggctttgtcgcggtacctgcgcccagcccgcgccgcaactctgtgcccagcttttgcaatcttttgttgcagcgctgaccgcaccaagttaaatgctcccttgcaatttttcttttttttgtttgtttgtttaatttttggagagctcgcgatcttggaaaagcctcagacgccatctacagttaaaacgtaggtaactgccctctcccgcaccccccccttacacgccccccaccctttccaccaaaaaaagggggtgcagcgcggattctggctgccgtgcgtcgccagccggtagacccgtgcttgtttcctttctctttttgtttggcttctaacgcgttgggactgagtcgccgccgtgagctccccgaagactgcacaaactaccgcgggctcctccgccccgtctgcgattcggaagccggcctgggggtcgcgtcgggagccctgcgctgcagctccgcaccttagcagcccgggtactcatccagatccacgccggggacacacacacagagtaactaaaagtgcggcgattctgcacatcgccgactgctttggggtaacaaaaagacccgagttgcctgccgaccgaggacccccgggagccgggctcggagcagacgaggtatccggcggcgcccatttgggggcttctaactctttctccacgcagcccctcttctgtcccctcccctctcgctcccttttaaaatcagtggcaccgaggcgcctgcagccgcactcgccagcgactcatctctccagcgggtttttttttgtttgtcgtgtgcgatcctcacactcatgaacatacacaggtctacccccatcacaatagcgagatatgggagatcgcggaacaaaacccaggatttcgaagagttgtcgtctataaggtccgcggagcccagccagagtttcagcccgaacctcggctccccgagcccgcccgagactccgaacttgtcgcattgcgtttcttgtatcgggaaatacttattgttggaacctctggagggagaccacgtttttcgtgccgtgcatctgcacagcggagaggagctggtgtgcaaggtgtttgatatcagctgctaccaggaatccctggcaccgtgcttttgcctgtctgctcatagtaacatcaaccaaatcactgaaattatcctgggtgagaccaaagcctatgtgttctttgagcgaagctatggggacatgcattccttcgtccgcacctgcaagaagctgagagaggaggaggcagccagactgttctaccagattgcctcggcagtggcccactgccatgacggggggctggtgctgcgggacctcaagctgcggaaattcatctttaaggacgaagagaggactcgggtcaagctggaaagcctggaagacgcctacattctgcggggagatgatgattccctctccgacaagcatggctgcccggcttacgtaagcccagagatcttgaacaccagtggcagctactcgggcaaagcagccgacgtgtggagcctgggggtgatgctgtacaccatgttggtggggcggtaccctttccatgacattgaacccagctccctcttcagcaagatccggcgtggccagttcaacattccagagactctgtcgcccaaggccaagtgcctcatccgaagcattctgcgtcgggagccctcagagcggctgacctcgcaggaaattctggaccatccttggttttctacagattttagcgtctcgaattcagcatatggtgctaaggaagtgtctgaccagctggtgccggacgtcaacatggaagagaacttggaccctttctttaactgagctcatgccccacggagacttagcaggttccaggagtgagcgagggcagcggaaaggagttcttccgggggacacgaattgcctggctgagtagcaagaaagacacactcttaagtttcttggttcagagcaggaaaaccttcaaggagctgactgaccacgtagcatgggggcaagaggcgtgggatggggattggggtgagatggatgggagcccgctggagcttgtcttccctaacatagcctgggagaccaccccttgccacttgggccacttccgcctaccccacttttcattttgttccaaaatagttgcagatcctgacagaatcaaaactctctgcctcaaacacacatcctggcatcgcactgttagcatttaacttcttgttaggattcagggaaggaacagttggccaagaattttttttcttttaaacaagccaaccacctagctggtaattaatgaggttcacttaaaaaaaaaattcggtgcacacagactgacatgaaacctgggtgctacagtaaaagaaaacaaaagtccagtttgtgtctcttaatcgctcacttcaactcatttcttctaaataaactatttaatatcctggtcaggaaatgacatgttaatgctttgctccctgaagggggaaaaaatctgtcctttaacaagctattctgttttgtgtcaattgggtccgtggcaaggaagctattaggaagtcaaacggtccaggatgcattacctgctaatccttaggtttaaagggggaaagaaaagggaagaagaaaggaaaagagaaatccaactcctttttcatgttttgcttttgaacaatgagggtttgtgtgacaggcattcctctttgctgagatgatagcaatggcctgagattttagcaagctcctggagtctgatgcttttgcagtactctgatcgcaactaaacatttgtctttgttttattagaaactagtgaaacaaagcaggttgtcccacatgtataaaatacagggcagctatttagttttctttacagagaatgatccttttaaggcttgtaaggccctctggtttggacaaaaaccctcagtagagacaagcgggaaggataattagctgaaagctatgatgatataaataaaaacagctctctatcccaatacgcacctttgtattttcaagaactcttctatttattaaggaaaatgtcacattgtgatgtattaagccagtacttcaattacgggttgacttgggatgacatattacatgctgtagttaacatttataattctttttccttgtttgagtatttctgtctctgaaataaccttttacttggcttttctagatagctttatttgatttcgagtggcaaaatgttttttattacggcttttctattgctgtatgatacagaactcttttggcataaatatttgtgttcccagtacctcacttgttcggatttgactgcctgtatatgttttgtgaaatggtcctgtttttgggtaggtgacacgtggactctagtatgtaaatgttacttgaatctgtgcttcataatagtgtgtggcatgtatgtgcagactcttggatgctttatgcctgcgcaccaggagccctgtcctcacgttcccaggagggcggcttcacccttcgtaaccaggagacaaggcggccatggatttgcccttgattctattttgctaatggaagatagaaaggagagaaggtttttttttttttttaacattctgaagatggtgctgtgtcaagaaggaccttttttttcccctctcccctattttttaagtaccttggaggaggagaggttggtgacatgcatggtggggatctatggcctctggtgctttgtcctgtatttggtttaatgtttttgtcctaatctcttcaatcaataaaattgtgcgtatttaactaaaaaaaaaaaaaaaaaa

SEQ ID NO: 247 - protein, 217 aa, Homo sapiens
MESVALYSFQATESDELAFNKGDTLKILNMEDDQNWYKAELRGVEGFIPKNYIRVKPHPWYSGRISRQLAEEILMKRNHLGAFLIRESESSPGEFSVSVNYGDQVQHFKVLREASGKYFLWEEKFNSLNELVDFYRTTTIAKKRQIFLRDEEPLLKSPGACFAQAQFDFSAQDPSQLSFRRGDIIEVLERPDPHWWRGRSCGRVGFFPRSYVQPVHL

SEQ ID NO: 248 - DNA, 874 bp, Homo sapiens
ctgagcccagctgctggagccccgagcagcggcatggagtccgtggccctgtacagctttcaggctacagagagcgacgagctggccttcaacaagggagacacactcaagatcctgaacatggaggatgaccagaactggtacaaggccgagctccggggtgtcgagggatttattcccaagaactacatccgcgtcaagccccatccgtggtactcgggcaggatttcccggcagctggccgaagagattctgatgaagcggaaccatctgggagccttcctgatccgggagagtgagagctccccaggggagttctctgtgtctgtgaactatggagaccaggtgcagcacttcaaggtgctgcgtgaggcctcggggaagtacttcctgtgggaggagaagttcaactccctcaacgagctggtcgacttctaccgcaccaccaccatcgccaagaagcggcagatcttcctgcgcgacgaggagcccttgctcaagtcacctggggcctgctttgcccaggcccagtttgacttctcagcccaggacccctcgcagctcagcttccgccgtggcgacatcattgaggtcctggagcgcccagacccccactggtggcggggccggtcctgcgggcgcgttggcttcttcccacggagttacgtgcagcccgtgcacctgtgagcagcccggcggccgatctggccaacgggcctttttacaggaactgaggtccagagaggacatggacacccccagctctgtcagagtcacacggggctcagtggacggccttggactgaacgtgggctcctaactgcctccggccgctctgcacaaactgggatggcccaggtcccccagcaagggt

SEQ ID NO: 249 - protein, 643 aa, Homo sapiens
SDENRNLRQELEGCYEKVARLQKVETEIQRVSEAYENLVKSSSKREALEKAMRNKLEGEIRRMHDFNRDLRERLETANKQLAEKEYEGSEDTRKTISQLFAKNKESQREKEKLEAELATARSTNEDQRRHIEIRDQALSNAQAKVVKLEEELKKKQVYVDKVEKMQQALVQLQAACEKREQLEHRLRTRLERELESLRIQQRQGNCQPTNVSEYNAATLMELLREKEERILALEADMTKWEQKYLEENVMRHFALDAAATVAAQRDTTVISHSPNTSYDTALEARIQKEEEEILMANKRCLDMEGRIKTLHAQIIEKDAMIKVLQQRSRKEPSKTEQLSCMRPAKSLMSISNAGSGLLSHSSTLTGSPIMEEKRDDKSWKGSLGILLGGDYRAEYVPSTPSPVPPSTPLLSAHSKTGSRDCSTQTERGTESNKTAAVAPISVPAPVAAAATAAAITATAATITTTMVAAAPVAVAAAAAPAAAAAPSPATAAATAAAVSPAAAGQIPAAASVASAAAVAPSAAAAAAVQVAPAAPAPVPAPALVPVPAPAAAQASAPAQTQAPTSAPAVAPTPAPTPTPAVAQAEVPASPATGPGPHRLSIPSLTCNPDKTDGPVFHSNTLERKTPIQILGQEPDAEMVEYLI

SEQ ID NO: 250 - DNA, 5572 bp, Homo sapiens
ctcagacgagaaccggaacttgaggcaagagttggaaggatgctatgagaaggtggcaagactgcagaaggtggagacagaaatccagcgcgtctcggaggcatatgagaacctcgtgaagtcatcctccaaaagagaggccctagagaaagccatgagaaacaagctagagggcgagattcggaggatgcatgatttcaacagggatctgagagagcgtctagagactgccaacaagcagcttgcagagaaggaatatgaggggtcagaggacaccagaaaaaccatctcgcagctctttgcaaaaaataaagaaagccagcgtgagaaggagaagctggaagcggagctggccactgcccgttctaccaatgaggaccaaagacgacacatcgaaatccgagatcaggccctgagtaatgcccaggccaaggtggtaaagctggaagaagagctgaaaaagaagcaagtgtacgttgacaaggtggagaagatgcagcaggcccttgtacagctccaggcagcatgtgaaaaacgtgagcagctagagcaccgtctccggacacgactggagagggaactggaatccctgagaatccagcagcgtcagggcaactgtcagcccaccaacgtttcagaatacaatgctgctacactgatggagctccttcgggagaaagaggagaggattctggctctggaagctgatatgacaaagtgggagcagaaatatttggaggagaatgtgatgagacattttgctctggatgctgctgcaactgtggctgctcagagggacacaacagtcatcagtcactctcctaacaccagctatgacacagctctagaagctcgcatccagaaagaggaggaagaaatcttgatggccaataagcgttgccttgacatggagggcaggattaagaccctccatgcccagattattgagaaggatgccatgatcaaagtactccagcagcgttcccggaaggagccgagcaagacagagcagctgtcgtgcatgcggccagcgaagtctctgatgtccatttccaatgctggatcaggcttgctctcccactcatccaccctgactggctcccccatcatggaagaaaagcgagacgacaagagctggaaggggagcctaggcattctcctgggtggagactaccgtgctgaatatgtcccttccacaccctcgcctgtgccaccctcgactcccctgctctcggctcactccaagacaggcagccgagactgcagtacccaaactgaacgtgggacggaatcgaacaaaactgcagctgttgctcccatctctgttcctgctccagttgctgctgccgccactgctgccgccatcactgccactgctgccaccatcaccaccaccatggtagctgctgctccagttgctgttgctgctgctgctgctccagctgctgctgctgccccgtctccagccactgccgctgctactgctgctgctgtttctccagctgctgctggtcagattccagctgctgcctctgttgcctcagctgctgccgttgctccttctgctgctgctgctgctgctgttcaggttgctccagctgctccggctccagttccagctccggctctggttccggttccagctccagcagcggctcaggcttctgctcctgctcagactcaggcaccaacttcagctccggctgtggctccaactccagctccaactccaactccagctgtggctcaggctgaggttcctgcaagtccagctaccggtcctggaccacatcgtttgtctataccaagtttgacctgcaatccagacaaaacagatgggcctgtgttccactccaatactctggaaagaaaaactcccattcagatcctgggacaagagcctgatgcagagatggtggaatatctcatctaaacggccaaatcaagagctgcagattatcagcaaaaatgcttttaatcattttcccccttttattggttcttgttttgagggtgaggacaagggttgtggggaggggatgttttttaacaggactttttattggaacaatgtactagttgagtaataccatgtgaacaccagtctattttggtatgcttagggagtacctctaaagacagattaatcagaatgtgctctaaagcttattgtttgaatttatacgaatactgggactgttaacaggtggctatacatcgacgttttcaatgtgcttaaatttgtttaaattttccatattctagatcattttttattgaagagcacagtatgtgtggaagacagtgtataacacgtagtttggaagtgggaagctagagagaattgagtgtgtgctgttttgtatagttactatcctgtgcagcagctggagaaagcactcacctcaggcttacaaaagggaatagtttcaggagctatgtaagctggaaaaaaggtagggagttttggggtgcagaagggtactggagctaattttttcttccagtttcccagctaccctgccccagggaattgtgtttgtcttcatttcagtggtgctttggaaatggattcttttggttccctcctggaggttcatacattcatatatatgctctggagtaatttatgcatttggataattaatatattgctttcagatgctgggagagtacattaactgagtgatgcgcaacttcctctctcttagggaattagaccatcagaggccttgatggagagttgcatggggtgctatatgcagacttccatggtttgtgtgtagccatgaacacagcttgcttgcatttagtaagaccaatcagcttagtgtttatttcttctacagcacagattcactggctgggtctccagtctcaaattgccaatcatttgcaaagtgaggaaggatctttgttgacaggttgaatgctttgaatttctggtgactactttgaaataacttgttttgtttgtcaaattctaagcatatgtcttaaaaggcatttttgactatcacctccaagggaatagcttgagaaacccaaagtactatgctgcagtcgggggagaggtggattgcagcagtatcctcaactacctcttctcactgtcagtgacaccatcttggaatacctttgggaagcagcaggaaatgtgcatgtgggtagagatcaaaggaggcaatggctccaagccttgccatagggctgcctccaaggacacagaaggatgccagttgccacaggtccctgccctgtgtcacctgtctgcccttcattaaggtgagaaatctgcagatagcatcattaagatcagttttaaggggtatagggagggtgagggaagtggggggtgttaggtaagggttgggggtagaggttttgggatgtcttagttagaaaccagattaatagaagagtaggcctgatatattacatcatgagccatagtggtgggaaagaactttagcaatatagccctacctcctcattttagtgatgaggaatctgagaactggagaggttcagtgactttttgaaagtcatacaacacagctaaccattatgccaatcaccatgcttattttgggaaactctttatcttttttaaattccattttatgaaaaggcatcttcatggtccagggaatatgtatcttgtaaaatgtacctggttggagtagcttgtccagtcttgacaaactactgaatttctgtcttgcctctccttcagtgccttttaaaaggttttcccttttctgatctgcatttcaacatagagtcacataaatgtccccctgagaaaccaatcccacttctttctaggagattgggtatcttagataatcttttggggttcctctgtgagtataggaatggtatccttcctaattatcttccaaaggaattattttgtgtgtgtgcctgtgtgtgtgtagagacataaaggagggtgatgtgattttcagctagtcctttcacattttcaataatgaggtaatcatgttacatacacattagtcctcagttataaagtgaatctcagatagaaattaaaagtgcagttgtgttaagactctttcatactaccctttagtcataaggagaaaaaaacactcaaatagtagaagcagcaagtagcaaacttcaggagagctactttctatccaaataatttaaaaaacacttttcacctactcctttcatggttataacacattggcagactttttgctggctctgggagccatgattttaatcacattctgcaaggtgacaaatgtcatacattccacattgtgtggtagccatctctttagactcatgtgttttggggaaaggaagaagttcttggctgagtactattttgaactttccagaaccctctcacaccagagacagttcttctctgttcagtttccaatccccgataatttgctaaaataacattgtacatccaagagagggaagaagagtatgtcagtatattatgcagaagatagatacagccttttcagaagatctccactagtttttgttccaaaaattcaagtttatgggagaaatctcaattagccaccttttcacagttgtgtggatataacatttgggggatctttctggactcctacctatctgtgcattttaccggcacctcaggaaaggagggtgaccaggttgtcttagcttgtactgcttggtgatctctgaggaccttctaattcagttgtaccccagtgttccatgtatagaaaaacttcattagaacaaactttacttgatatgaaactcctattaacagtctttttttgaaataaaaagtagcttgagctttcttttaaaatcatgtatcttgattgttgatttaatgaaggatttccttttaatgctgcttttgagcttcaaggtaataggacagcaggaacctaaaatatctgccatcatctgccataggaaagatacccagagacccatcatgttctctttttgttgttacactgttgggtgggtataacaattggaaaatgaacaaactgattgattgtgcaaactactttttatgacaagcctaaaccctcataatgcggcagcttaaagtgtatacatatgcactaactttgatcaattatattctcatatctgttagctacacagtctcctattatctcaattgcttatgtgcatatggaatatgttacttaaaacgtgtgcattcttactgaaaatgttttcaaaggaaggtatcagctgtgggctaattgccaccaatttcagcctgccacgattcttggaaatatgtcttccaagtgccatccatcatcagtaggacaagtgtcgggagtttgtttatttttttccagtagcaacgatgggttacatggagccatgaaacctccttctggcctcccttgtgattaatggcatgtgtttgtaaaatggatagctggggttggcagatggctagagaagaatcgcctttggtttaaaatgtatgtggtcccctaatgattgtgaccccattctgtaatcaactgagctagttccaataaagttaagcaggtttaaatcc

SEQ ID NO: 251 - protein, 196 aa, Homo sapiens
MNNGGKAEKENTPSEANLQEEEVRTLFVSGLPLDIKPRELYLLFRPFKGYEGSLIKLTSKQPVGFVSFDSRSEAEAAKNALNGIRFDPEIPQTLRLEFAKANTKMAKNKLVGTPNPSTPLPNTVPQFIAREPYELTVPALYPSSPEVWAPYPLYPAELAPALPPPAFTYPASLHAQMRWLPPSEATSQGWKSRQFC

SEQ ID NO: 252 - DNA, 1594 bp, Homo sapiens
atcccggacttcccagagcctgcctggagcgcgtactcagcggctctcgggtcccagcgtcccagccgcggcccgcgctcctccgccccgctcctcctcctcctcttcctcctcctcctcctctctaggcacccccgtcccctccttccagcggctgcagcccccagccccaactctccgcgcttactcctgggacgcgcgtcctcgccccatcctttgcttccttccttccttccttcttccttcctcccctggctcccgccctccctctccaggtcgccctcccggggcccgattgtctcggttccccgctgccggcccgcgccctgccccgtctctcccttgcacttcctgagtcgcccgccgccgccgtcgcagactcgccgcgggagccccagcccaacccgagcccgacagccactgccccggctccagctccagccccacagcccgcggcgcccgcccgagggagccccggcgcccggggaaggctccagtgggctagcgcgccctcgcccagccccgcgccccagccctgcccggcccggcgaggaaggaccgggaagatgaacaacggcggcaaagccgagaaggagaacaccccgagcgaggccaaccttcaggaggaggaggtccggaccctatttgtcagtggccttcctctggatatcaaacctcgggagctctatctgcttttcagaccatttaagggctatgagggttctcttataaagctcacatctaaacagcctgtaggttttgtcagttttgacagtcgctcagaagcagaggctgcaaagaatgctttgaatggcatccgcttcgatcctgaaattccgcaaacactacgactagagtttgctaaggcaaacacgaagatggccaagaacaaactcgtagggactccaaaccccagtactcctctgcccaacactgtacctcagttcattgccagagagccatatgagctcacagtgcctgcactttaccccagtagccctgaagtgtgggccccgtaccctctgtacccagcggagttagcgcctgctctacctcctcctgctttcacctatcccgcttcactgcatgcccagatgcgctggctccctccctccgaggctacttctcagggctggaagtcccgtcagttctgctgaatactatacccttcagcaatggctactagaaggacgaacaattgccctcctttggaagtacggctaatagaagccctagatccgaataagatccgaataagaatatgtaatggaccaggcgcagtgcctcacgcctgtcatcccagcactttgggaggctgaggcaggcggatcacttgatgacagaagtgtgagaccagcccagccaacatggtcccaggtgtgtgatggcggctgcaatctgtcttgtgggtattaatgcaatcttcagtggtggctactgttctctagctgttctacaaaactggagcatgctggcttgaaaaacccttgcccagtttggatcccttcaagactttgtcacagcctctatcacacatctgtttttctcgaagaaaaaaatataattaataaaaatgttttactcttttacactg

SEQ ID NO: 253 - protein, 364 aa, Homo sapiens
MPQTVILPGPAPWGFRLSGGIDFNQPLVITRITPGSKAAAANLCPGDVILAIDGFGTESMTHADAQDRIKAAAHQLCLKIDRGETHLWSPQVSEDGKAHPFKINLESEPQDGNYFEHKHNIRPKPFVIPGRSSGCSTPSGIDCGSGRSTPSSVSTVSTICPGDLKVAAKLAPNIPLEMELPGVKIVHAQFNTPMQLYSDDNIMETLQGQVSTALGETPLMNEPTASVPPESDVYRMLHDNRNEPTQPRQSGSFRVLQGMVDDGSDDRPAGTRSVRAPVTKVHGGSGGAQRMPLCDKCGSGIVGAVVKARDKYRHPECFVCADCNLNLKQKGYFFIEGELYCETHARARTKPPEGYDTVTLYPKA

SEQ ID NO: 254 - DNA, 1722 bp, Homo sapiens
gcggccggtcgaccggagtggctgccctgcgcggggacactcagagcccggtgggcgggaggaaggcggcatgccccagacggtgatcctcccgggccctgcgccctggggcttcaggctctcagggggcatagacttcaaccagcctttggtcatcaccaggattacaccaggaagcaaggcggcagctgccaacctgtgtcctggagatgtcatcctggctattgacggctttgggacagagtccatgactcatgctgatgcgcaggacaggattaaagcagcagctcaccagctgtgtctcaaaattgacaggggagaaactcacttatggtctccacaagtatctgaagatgggaaagcccatcctttcaaaatcaacttagaatcagaaccacaggacgggaactactttgaacacaagcataatattcggcccaaacctttcgtgatcccgggccgaagcagtggatgcagcactccctccgggattgactgtggcagtggacgcagcaccccttcttctgtcagtactgttagtaccatttgcccaggtgacttgaaagttgcggctaagctggcccctaacattcctttggaaatggaacttcctggtgtgaagattgtacatgctcagtttaatacacctatgcagttgtactcagatgacaatattatggaaacactccagggtcaggtttcaacagccctaggggaaacacctttgatgaacgagcccacagcctcggtgccccccgagtcggacgtgtaccggatgctccacgacaatcggaatgagcccacacagcctcgccagtcgggctccttcagagtgctccagggaatggtggacgatggctctgatgaccgtccggctggaacgcggagtgtgagagctccggtgacgaaagtccatggcggttcaggcggggcacagaggatgccgctctgtgacaaatgtgggagtggcatagttggtgctgtggtgaaggcgcgggataagtaccggcaccctgagtgcttcgtgtgtgccgactgcaacctcaacctcaagcaaaagggctacttcttcatagaaggggagctgtactgcgaaacccacgcaagagcccgcacaaagcccccagagggctatgacacggtcactctgtatcccaaagcttaagtctctgcaggcgtggcacgcacgcacgcacccacccacgcgcacttacacgagaagacattcatggctttgggcagaaggattgtgcagattgtcaactccaaatctaaagtcaaggctttagacctttatcctattgtttattgaggaaaaggaatgggaggcaaatgcctgctatgtgaaaaaaacatacacttagctatgttttgcaactctttttggggctagcaataatgatatttaaagcaataattttttgtatgtcatactccacaatttacatgtatattacagccatcaaacacataaacatcaagatatttgaaggactctaattgtctttccttgacaagttgattttgcaattgtggtaaatagcaaataacaatcttgtattctaacataatctgcagttgtctgtatgtgttttaactattacagtgcatgttagggagaaattccctgaatttctttagttttgtattcaaacaattatgccactcgatgcaacaaacataataaatacataaaggatttaaaaaaaaaaaaaaaaaaaa

SEQ ID NO: 255 - protein, 771 aa, Homo sapiens [sequence omitted]

SEQ ID NO: 256 - DNA, 2530 bp, Homo sapiens
ggaattccctgcagcatgggctggttaactaggattgtctgtcttttctggggagtattacttacagcaagagcaaactatcagaatgggaagaacaatgtgccaaggctgaaattatcctacaaagaaatgttggaatccaacaatgtgatcactttcaatggcttggccaacagctccagttatcataccttccttttggatgaggaacggagtaggctgtatgttggagcaaaggatcacatattttcattcgacctggttaatatcaaggattttcaaaagattgtgtggccagtatcttacaccagaagagatgaatgcaagtgggctggaaaagacatcctgaaagaatgtgctaatttcatcaaggtacttaaggcatataatcagactcacttgtacgcctgtggaacgggggcttttcatccaatttgcacctacattgaaattggacatcatcctgaggacaatatttttaagctggagaactcacattttgaaaacggccgtgggaagagtccatatgaccctaagctgctgacagcatcccttttaatagatggagaattatactctggaactgcagctgattttatggggcgagactttgctatcttccgaactcttgggcaccaccacccaatcaggacagagcagcatgattccaggtggctcaatgatccaaagttcattagtgcccacctcatctcagagagtgacaatcctgaagatgacaaagtatactttttcttccgtgaaaatgcaatagatggagaacactctggaaaagctactcacgctagaataggtcagatatgcaagaatgactttggagggcacagaagtctggtgaataaatggacaacattcctcaaagctcgtctgatttgctcagtgccaggtccaaatggcattgacactcattttgatgaactgcaggatgtattcctaatgaactttaaagatcctaaaaatccagttgtatatggagtgtttacgacttccagtaacattttcaagggatcagccgtgtgtatgtatagcatgagtgatgtgagaagggtgttccttggtccatatgcccacagggatggacccaactatcaatgggtgccttatcaaggaagagtcccctatccacggccaggaacttgtcccagcaaaacatttggtggttttgactctacaaaggaccttcctgatgatgttataacctttgcaagaagtcatccagccatgtacaatccagtgtttcctatgaacaatcgcccaatagtgatcaaaacggatgtaaattatcaatttacacaaattgtcgtagaccgagtggatgcagaagatggacagtatgatgttatgtttatcggaacagatgttgggaccgttcttaaagtagtttcaattcctaaggagacttggtatgatttagaagaggttctgctggaagaaatgacagtttttcgggaaccgactgctatttcagcaatggagctttccactaagcagcaacaactatatattggttcaacggctggggttgcccagctccctttacaccggtgtgatatttacgggaaagcgtgtgctgagtgttgcctcgcccgagacccttactgtgcttgggatggttctgcatgttctcgctattttcccactgcaaagagacgcacaagacgacaagatataagaaatggagacccactgactcactgttcagacttacaccatgataatcaccatggccacagccctgaagagagaatcatctatggtgtagagaatagtagcacatttttggaatgcagtccgaagtcgcagagagcgctggtctattggcaattccagaggcgaaatgaagagcgaaaagaagagatcagagtggatgatcatatcatcaggacagatcaaggccttctgctacgtagtctacaacagaaggattcaggcaattacctctgccatgcggtggaacatgggttcatacaaactcttcttaaggtaaccctggaagtcattgacacagagcatttggaagaacttcttcataaagatgatgatggagatggctctaagaccaaagaaatgtccaatagcatgacacctagccagaaggtctggtacagagacttcatgcagctcatcaaccaccccaatctcaacacgatggatgagttctgtgaacaagtttggaaaagggaccgaaaacaacgtcggcaaaggccaggacataccccagggaacagtaacaaatggaagcacttacaagaaaataagaaaggtagaaacaggaggacccacgaatttgagagggcacccaggagtgtctgagctgcattacctctagaaacctcaaacaagtagaaacttgcctagacaataactggaaaaacaaatgcaatatacatgaacttttttcatggcattatgtggatgtttacaatggtgggaaattcagctgagttccaccaattataaattaaatccatgagtaactttcctaataggcttttttttcctaataccaccg

SEQ ID NO: 257 - protein, 1575 aa, Homo sapiens
MPHEELPSLQRPRYGSIVDDERLSAEEMDERRRQNIAYEYLCHLEEAKRWMEVCLVEELPPTTELEEGLRNGVYLAKLAKFFAPKMVSEKKIYDVEQTRYKKSGLHFRHTDNTVQWLRAMESIGLPKIFYPETTDVYDRKNIPRMIYCIHALSLYLFKLGIAPQIQDLLGKVDFTEEEISNMRKELEKYGIQMPSFSKIGGILANELSVDEAALHAAVIAINEAVEKGIAEQTVVTLRNPNAVLTLVDDNLAPEYQKELWDAKKKKEENARLKNSCISEEERDAYEELLTQAEIQGNINKVNRQAAVDHINAVIPEGDPENTLLALKKPEAQLPAVYPFAAAMYQNELFNLQKQNTMNYLAHEELLIAVEMLSAVALLNQALESNDLVSVQNQLRSPAIGLNNLDKAYVERYANTLLSVKLEVLSQGQDNLSWNEIQNCIDMVNAQIQEENDRVVAVGYINEAIDEGNPLRTLETLLLPTANISDVDPAHAQHYQDVLYHAKSQKLGDSESVSKVLWLDEIQQAVDEANVDEDRAKQWVTLVVDVNQCLEGKKSSDILSVLKSSTSNANDIIPECADKYYDALVKAKELKSERVSSDGSWLKLNLHKKYDYYYNTDSKESSWVTPESCFYKESWLTGKEIEDIIEEVTVGYIRENIWSASEELLLRFQATSSGPILREEFEARKSFLHEQEENVVKIQAFWKGYKQRKEYMHRRQTFIDNTDSVVKIQSWFRMATARKSYLSRLQYFRDHNNEIVKIQSLLRANKARDDYKTLVGSENPPLTVIRKFVYLLDQSDLDFQEELEVARLREEVVTKIRANQQLEKDLNLMDIKIGLLVKNRITLEDVISHSKKLNKKKGGEMEILNNTDNQGIKSLSKERRKTLETYQQLFYLLQTNPLYLAKLIFQMPQNKSTKFMDTVIFTLYNYASNQREEYLLLKLFKTALEEEIKSKVDQVQDIVTGNPTVIKMVVSFNRGARGQNTLRQLLAPVVKEIIDDKSLIINTNPVEVYKAWVNQLETQTGEASKLPYDVTTEQALTYPEVKNKLEASIENLRRVTDKVLNSIISSLDLLPYGLRYIAKVLKNSIHEKFPDATEDELLKIVGNLLYYRYMNPAIVAPDGFDIIDMTAGGQINSDQRRNLGSVAKVLQHAASNKLFEGENEHLSSMNNYLSETYQEFRKYFKEACNVPEPEEKFNMDKYTDLVTVSKPVIYISIEEIISTHSLLLEHQDAIAPEKNDLLSELLGSLGEVPTVESFLGEGAVDPNDPNKANTLSQLSKTEISLVLTSKYDIEDGEAIDSRSLMIKTKKLIIDVIRNQPGNTLTEILETPATAQQEVDHATDMVSRAMIDSRTPEEMKHSQSMIEDAQLPLEQKKRKIQRNLRTLEQTGHVSSENKYQDILNEIAKDIRNQRIYRKLRKAELAKLQQTLNALNKKAAFYEEQINYYDTYIKTCLDNLKRKNTRRSIKLDGKGEPKGAKRAKPVKYTAAKLHEKGVLLDIDDLQTNQFKNVTFDIIATEDVGIFDVRSKFLGVEMEKVQLNIQDLLQMQYEGVAVMKMFDKVKVNVNLLIYLLNKKFYGK

SEQ ID NO: 258 - DNA, 5767 bp, Homo sapiens
gagggaggagagttcacttttacttcagtgtcagcgcgcggcggccgtggctggctctggcgagagagcaccgagggagtgggtcgcagatcttcgggcggctaggggaaatcggcgagaggcgggatccgagcgcgccggcggggcgcagagcccgcgagcctggccagcgagggtagccgcggggggcgcgccccgggcgggcccccggagacgcgcaggatgccacacgaagagctgccgtcgctgcagagaccccgctatggctctattgtggacgatgaaaggctctctgcagaggagatggatgagaggaggcggcagaacattgcttatgaatatctgtgccacttagaggaagccaaaaggtggatggaagtttgcttagttgaagaattgccaccaaccactgaattggaagaagggctccggaatggagtttaccttgcaaagttagccaagttctttgccccgaaaatggtatcagagaaaaagatctatgatgtggaacaaacacgttataagaagtctggccttcattttcgacacacagataataccgtccagtggttaagagcgatggagtctattggtctacccaagatattttatccagaaacaacagatgtctatgatcggaaaaacataccaagaatgatatattgcattcacgcactgagtttgtatctgttcaaactaggaatagcaccccagatccaggatttgttgggcaaagtagacttcacagaggaggaaatcagtaatatgagaaaagaacttgagaaatatggaatacagatgccatctttcagcaaaataggtggtattctggccaatgaactgtccgtggatgaagctgcattacatgctgcagttatagccattaatgaagcagttgaaaaaggaatagcagagcaaaccgttgtaacactaagaaacccaaatgcggttttaactttagtggatgacaaccttgcaccagaatatcagaaagaactctgggatgccaaaaagaaaaaagaggaaaatgcaagactgaagaatagctgtatttcagaagaagaaagagatgcttatgaagaactgctgacacaagcagaaatccaaggcaatattaataaagtcaacaggcaggctgcagtggaccatatcaatgctgtcattccggaaggtgaccccgagaatacgctgcttgcactgaagaaaccagaggcccagctgcctgctgtttatccctttgctgctgccatgtatcagaacgaacttttcaacctccagaaacagaacaccatgaactacttggcccacgaggagcttttgattgctgtggaaatgttgtctgctgttgctttactaaaccaggccttggaaagcaacgatcttgtgtctgtgcagaatcaactcagaagccccgcaataggcttaaacaatctggacaaggcatatgtggaacgttatgcaaacacactactctctgttaaactagaagttttatcccaagggcaagataacttaagctggaatgaaattcagaattgtattgatatggttaatgctcaaattcaagaagaaaatgaccgagttgtagctgtagggtacatcaatgaagctattgatgaagggaatcctttgaggactttagaaactttgctcctacctactgcgaatattagtgatgtggacccagcccatgcccagcactaccaggatgttttataccatgctaaatcacagaaactcggagactctgagagtgtttccaaagtgctttggctggatgagatacagcaagccgtcgatgaggccaacgtggacgaggacagagcaaaacaatgggttactctggtggttgatgttaatcagtgtttggaaggaaaaaaatcaagtgatattttgtctgtattgaagtcttccacttctaatgcaaatgacataatcccggagtgtgctgacaaatactatgatgcccttgtgaaggcaaaagagctcaaatctgaaagagtgtctagtgacggttcatggctcaaactcaacctgcacaaaaaatatgactactattacaacactgattcaaaagagagttcctgggtcacacctgaatcatgcttctataaagaatcatggctcacaggaaaagaaatcgaggacattattgaggaagtcacagtaggttacattcgtgagaatatatggtctgcttcagaagagttgcttcttcgctttcaagccacaagctcaggacccatccttagggaagagtttgaagctagaaaatcatttttgcatgaacaagaagagaatgtggtcaaaatacaggctttttggaaaggatataaacaacggaaggagtatatgcacaggcggcaaacgttcattgataatactgattctgttgtgaagattcagtcctggttccgaatggcaactgcaagaaagagctatctttcaagactacagtatttcagagatcataataatgaaattgtgaaaatacagtcactgttgagagcgaacaaagctagagatgactacaaaacattggttggctctgaaaacccaccattaacagtaattcgcaaatttgtatacctgctggaccaaagtgatttggatttccaggaggaactagaggttgcacgattaagggaagaagtagtgaccaagatcagggccaatcaacagctggaaaaagacctgaacctgatggacatcaagattggactgctggtgaagaacaggatcacactagaggatgtaatttcacacagtaaaaagctgaacaagaaaaaaggaggagaaatggaaatactgaataacaccgacaaccaaggaataaaaagtttgagtaaggagaggagaaaaacactagaaacatatcagcagctgttttaccttttacagaccaaccctttatacttggctaagctgattttccagatgccacagaacaagtccactaaatttatggatactgttattttcacactatataattatgcctctaatcagcgagaagaatatctacttctcaagctttttaaaactgctctggaggaagaaataaaatcaaaagtggaccaggtacaggacatagttactggtaaccctacagtcatcaagatggtcgtcagcttcaatagaggtgcccggggacagaacaccctgcgccaactcctggctccagtggtaaaagagatcatcgacgacaagtcgctgattatcaacacaaaccctgtagaggtgtacaaggcttgggtgaaccaactagaaacacagactggagaggccagcaagttgccttatgatgtgaccacagaacaagctctaacatacccagaagtgaaaaataaactggaggcttccattgagaacctgagaagggtcaccgacaaagtcctgaattctatcatttcttcccttgatctactgccttatggattgaggtatatagccaaagtactgaagaattcgatccatgagaaattccccgatgcaacagaagatgagctattaaagattgttggaaacctcctgtactatcggtacatgaatccagccattgtagctccagatggctttgatatcatcgacatgacagctggaggtcagataaattctgaccaaaggagaaacttaggatcagtggccaaggttcttcagcacgcagcctccaacaagctgtttgaaggagaaaatgagcatctctcatctatgaacaattatttatcagagacgtatcaggaattcaggaaatatttcaaagaagcatgtaatgtccctgagccagaagagaagtttaatatggacaaatacacagacctggtgacagtcagcaaaccagtcatttatatttcaattgaagaaatcatcagcacacactcactcctgttggaacaccaggatgcaattgcccctgagaaaaatgacttactgagtgaattgctggggtcgctgggagaggtgccaaccgtggaatcttttcttggggaaggagcagttgaccccaatgaccctaacaaggcaaatacactaagtcagctttcaaagaccgagatttctcttgtcttgacaagcaaatatgacatagaggacggtgaagctatagatagccgaagcctcatgataaagaccaagaagctgataattgatgtgatccggaaccagccagggaacacattgacagaaatcttagagacaccagcaactgcgcaacaggaggtagaccatgccacggacatggtgagccgtgcaatgatagattccaggactccagaagaaatgaagcatagccaatctatgattgaagatgcacagctgcctcttgagcagaagaagaggaaaatccagaggaatcttcggacgttggaacagactggacacgtgtcatccgaaaataaataccaagacattctcaatgagattgccaaggatattcgaaatcaaagaatctatcgtaagcttcgaaaagctgaattggcaaaacttcagcagaccctgaatgcacttaacaagaaggcagcattttatgaagagcaaatcaattattatgacacctacataaagacttgtttagacaacttaaaaagaaaaaatactcggagatcaattaaactagatggaaaaggagaacccaaaggggcgaagagagcgaagccagtgaagtacactgcagcaaagctgcatgagaaaggtgtcctgctagatatagatgatcttcaaacaaaccagtttaagaatgttacatttgatatcatagctactgaagatgtaggcattttcgatgtaagatcaaaattccttggtgttgagatggaaaaggtgcaactcaatattcaggatttacttcagatgcaatatgaaggagtagctgtaatgaaaatgtttgataaggttaaagtgaatgtaaaccttctcatatacctgctgaacaagaagttctatggaaagtgaagtgcctacagaaatttcttggattctgtatcatctggattaggaaatgaatttgtttaatatttttgtttttaaacatgattgaaatcactgcttataaatgtgtgattttttttaaatgaccaaaactgttctgaagaatgtacccaggtgcctttttgctaatttgatactataatagaatgagacataaaatgaattaatggaaacatatccacactgtactgtgatataggtactctgatttaaaactttggacatcctgtgatctgttttaaagttggggggtgggaaatttagctgactagggacaaacatgtaaacctattttcctatgaaaaaagttttaaatgtcccacttgaataacgtaattcttcatagtttttttaatctatggataaatggaaacctaattatttgtaatgaattatttagacagttctaagccctgtcttctgggagttatcaattttaaagagaacttttgtgcaattcaaatgaagtttttataagtaattgaaaatgacaacacaataacactttctgtataaaagtatatattttatgtgatttattcctactaaatgaaagtgcactactgcctcatgtaaagactcttgcacgcagagcctttaagtgactaaggaacaacatagatagtgagcatagtccccacctccacccctcacaatttatttgaatacttcaattgtgcctctcaattttttgtaatgctaaaaaatcagtatctagatggtttttaaatgtattctctggaaattgttttatgtaaaataaatgttacttaattccatt

SEQ ID NO: 259 - protein, 642 aa, Homo sapiens
MKRSSVSSGGAGRLSMQELRSQDVNKQGLYTPQTKEKPTFGKLSINKPTSERKVSLFGKRTSGHGSRNSQLGIFSSSEKIKDPRPLNDKAFIQQCIRQLCEFLTENGYAHNVSMKSLQAPSVKDFLKIFTFLYGFLCPSYELPDTKFEEEVPRIFKDLGYPFALSKSSMYTVGAPHTWPHIVAALVWLIDCIKIHTAMKESSPLFDDGQPWGEETEDGIMHNKLFLDYTIKCYESFMSGADSFDEMNAELQSKLKDLFNVDAFKLESLEAKNRALNEQIARLEQEREKEPNRLESLRKLKASLQGDVQKYQAYMSNLESHSAILDQKLNGLNEEIARVELECETIKQENTRLQNIIDNQKYSVADIERINHERNELQQTINKLTKDLEAEQQKLWNEELKYARGKEAIETQLAEYHKLARKLKLIPKGAENSKGYDFEIKFNPEAGANCLVKYRAQVYVPLKELLNETEEEINKALNKKMGLEDTLEQLNAMITESKRSVRTLKEEVQKLDDLYQQKIKEAEEEDEKCASELESLEKHKHLLESTVNQGLSEAMNELDAVQREYQLVVQTTTEERRKVGNNLQRLLEMVATHVGSVEKHLEEQIAKVDREYEECMSEDLSENIKEIRDKYEKKATLIKSSEE

SEQ ID NO: 260 - DNA, 2150 bp, Homo sapiens
ctcgagccacgaaggccccgctgtcctgtctagcagatacttgcacggtttacagaaattcggtccctgggtcgtgtcaggaaactggaaaaaaggtcataagcatgaagcgcagttcagtttccagcggtggtgctggccgcctctccatgcaggagttaagatcccaggatgtaaataaacaaggcctctatacccctcaaaccaaagagaaaccaacctttggaaagttgagtataaacaaaccgacatctgaaagaaaagtctcgctatttggcaaaagaactagtggacatggatcccggaatagtcaacttggtatattttccagttctgagaaaatcaaggacccgagaccacttaatgacaaagcattcattcagcagtgtattcgacaactctgtgagtttcttacagaaaatggttatgcacataatgtgtccatgaaatctctacaagctccctctgttaaagacttcctgaagatcttcacatttctttatggcttcctgtgcccctcatacgaacttcctgacacaaagtttgaagaagaggttccaagaatctttaaagaccttgggtatccttttgcactatccaaaagctccatgtacacagtgggggctcctcatacatggcctcacattgtggcagccttagtttggctaatagactgcatcaagatacatactgccatgaaagaaagctcacctttatttgatgatgggcagccttggggagaagaaactgaagatggaattatgcataataagttgtttttggactacaccataaaatgctatgagagttttatgagtggtgccgacagctttgatgagatgaatgcagagctgcagtcaaaactgaaggatttatttaatgtggatgcttttaagctggaatcattagaagcaaaaaacagagcattgaatgaacagattgcaagattggaacaagaaagagaaaaagaaccgaatcgtctagagtcgttgagaaaactgaaggcttccttacaaggagatgttcaaaagtatcaggcatacatgagcaatttggagtctcattcagccattcttgaccagaaattaaatggtctcaatgaggaaattgctagagtagaactagaatgtgaaacaataaaacaggagaacactcgactacagaatatcattgacaaccagaagtactcagttgcagacattgagcgaataaatcatgaaagaaatgaattgcagcagactattaataaattaaccaaggacctggaagctgaacaacagaagttgtggaatgaggagttaaaatatgccagaggcaaagaagcgattgaaacacaattagcagagtatcacaaattggctagaaaattaaaacttattcctaaaggtgctgagaattccaaaggttatgactttgaaattaagtttaatcccgaggctggtgccaactgccttgtcaaatacagggctcaagtttatgtacctcttaaggaactcctgaatgaaactgaagaagaaattaataaagccctaaataaaaaaatgggtttggaggatactttagaacaattgaatgcaatgataacagaaagcaagagaagtgtgagaactctgaaagaagaagttcaaaagctggatgatctttaccaacaaaaaattaaggaagcagaggaagaggatgaaaaatgtgccagtgagcttgagtccttggagaaacacaagcacctgctagaaagtactgttaaccaggggctcagtgaagctatgaatgaattagatgctgttcagcgggaataccaactagttgtgcaaaccacgactgaagaaagacgaaaagtgggaaataacttgcaacgtctgttagagatggttgctacacatgttgggtctgtagagaaacatcttgaggagcagattgctaaagttgatagagaatatgaagaatgcatgtcagaagatctctcggaaaatattaaagagattagagataagtatgagaagaaagctactctaattaagtcttctgaagaatgaagataaaatgttgatcatgtatatatatccatagtgaataaaattgtctcagtaaaaaaaaaaaaaaaaaaaaaaaaaaaaaaaaaaaaaaaaaaaaaaaaaaaaaaaaaaaaaaaa

SEQ ID NO: 261 - protein, 373 aa, Homo sapiens
MSSTPHDPFYSSPFGPFYRRHTPYMVQPEYRIYEMNKRLQSRTEDSDNLWWDAFATEFFEDDATLTLSFCLEDGPKRYTIGRTLIPRYFSTVFEGGVTDLYYILKHSKESYHNSSITVDCDQCTMVTQHGKPMFTKVCTEGRLILEFTFDDLMRIKTWHFTIRQYRELVPRSILAMHAQDPQVLDQLSKNITRMGLTNFTLNYLRLCVILEPMQELMSRHKTYNLSPRDCLKTCLFQKWQRMVAPPAEPTRQPTTKRRKRKNSTSSTSNSSAGNNANSTGSKKKTTAANLSLSSQVPDVMVVGEPTLMGGEFGDEDERLITRLENTQYDAANGMDDEEDFNNSPALGNNSPWNSKPPATQETKSENPPPQASQ

SEQ ID NO: 262 - DNA, 2330 bp, Homo sapiens
gtgagcgtgtgtgcgtgcgtctactttgtactgggaagaacacagcccatgtgctctgcatggacgttactgatactctgtttagcttgattttcgaaaagcaggcaagatgtccagcacaccacatgaccccttctattcttctcctttcggcccattttataggaggcatacaccatacatggtacagccagagtaccgaatctatgagatgaacaagagactgcagtctcgcacagaggatagtgacaacctctggtgggacgcctttgccactgaattttttgaagatgacgccacattaaccctttcattttgtttggaagatggaccaaagcgatacactatcggcaggaccctcatcccccgttactttagcactgtgtttgaaggaggggtgaccgacctgtattacattctcaaacactcgaaagagtcataccacaactcatccatcacggtggactgcgaccagtgtaccatggtcacccagcacgggaagcccatgtttaccaaggtatgtacagaaggcagactgatcttggagttcacctttgatgatctcatgagaatcaaaacatggcactttaccattagacaataccgagagttagtcccgagaagcatcctagccatgcatgcacaagatcctcaggtcctggatcagctgtccaaaaacatcaccaggatggggctaacaaacttcaccctcaactacctcaggttgtgtgtaatattggagccaatgcaggaactgatgtcgagacataaaacttacaacctcagtccccgagactgcctgaagacctgcttgtttcagaagtggcagaggatggtggctccgccagcagaacccacaaggcaaccaacaaccaaacggagaaaaaggaaaaattccaccagcagcacttccaacagcagcgctgggaacaatgcaaacagcactggcagcaagaagaagaccacagctgcaaacctgagtctgtccagtcaggtacctgatgtgatggtggtaggagagccaactctgatgggaggtgagtttggggacgaggacgaaaggctaatcactagattagaaaacacgcaatatgatgcggccaacggcatggacgacgaggaggacttcaacaattcacccgcgctggggaacaacagcccgtggaacagtaaacctcccgccactcaagagaccaaatcagaaaaccccccaccccaggcttcccaataagatgatcggcaccagaatccactgtcaataggcccgtgggtgatcattacaattgcaaatctttacttacaggagaggaaacagaagagataaaaacttttccatgcaaatatctatttctaaaccacaatgatctgattttctttcttctttctttttttctaattgagaggattattcccagtaagcttccatgaccctttcttggaggccttcacaggtaatacagatactggcactgattgtaattaaaatgagagaaaactctagcgcatcttctggcacggttttaacaacgtgtttgtgttgaatttcctttttatgcatcaaacgaaggccatattgtccataaatgctcagtgctcaggatctcattaatatgccgaacctaactacagatgactttttaatattgtaaaatattttctgctttttgacttgcatctgagagtttcttgtttcagtaaaaaaagaaaagacaaaaaaatcagctttggaaagtaatttaaatgtaccttattttttttttctttatgttttctttcattgggcaacagctaagagggcccagcaaggtaatttatggttgagctgatgtcaattggttcttgtcttgagtcgactcaatttagcccaagtgctgaaacaagaaatgtcatttttttcatcaaagacaccagggcagatttttaagtaaagaaagacaattggacccttaagaatttatgcatttgtaaagttgctgttgatccaaatattttcaagccatgtaatccattggttttgtgggcagtttaataaacctgaacctttgtgtgttttctaattgtacctgagttgaccatcctttctttttatagtatatttcttgtatgatattttgtaaagctctcacctggttcttttatggggacttttcgtttttgggcaactccagtgtatttatgtgaaactttataagagaattaatttttccatttgcatattaatatgttcctccacacatgtaaaggcacagtggctccgtgtgttaaaaaacagctgtattttatgtatgctttactgataagtgtgccaataataaactgtgttaatgacc

SEQ ID NO: 263 - protein, 384 aa, Homo sapiens
MKVTSLDGRQLRKMLRKEAAARCVVLDCRPYLAFAASNVRGSLNVNLNSVVLRRARGGAVSARYVLPDEAARARLLQEGGGGVAAVVVLDQGSRHWQKLREESAARVVLTSLLACLPAGPRVYFLKGGYETFYSEYPECCVDVKPISQEKIESERALISQCGKPVVNVSYRPAYDQGGPVEILPFLYLGSAYHASKCEFLANLHITALLNVSRRTSEACMTHLHYKWIPVEDSHTADISSHFQEAIDFIDCVREKGGKVLVHCEAGISRSPTICMAYLMKTKQFRLKEAFDYIKQRRSMVSPNFGFMGQLLQYESEILPSTPNPQPPSCQGEAAGSSLIGHLQTLSPDMQGAYCTFPASVLAPVPTHSTVSELSRSPVATATSC

SEQ ID NO: 264 - DNA, 2473 bp, Homo sapiens
aatcgcgaaacccggcgagcggcgcgctggctatcgagcgagcggggcggaaccgggagttgcgccgccgctcgggcgccgggctccgtcgcggccgcagccccgcgggtcgccctcccgtgcctcgcccgcggacaccctggccgtggacaccctggccgtgggcacccgcggggcgcggcgcgggcgctgcgcggcggcggcggcggcatgaaggtcacgtcgctcgacgggcgccagctgcgcaagatgctccgcaaggaggcggcggcgcgctgcgtggtgctcgactgccggccctatctggccttcgctgcctcgaacgtgcgcggctcgctcaacgtcaacctcaactcggtggtgctgcggcgggcccggggcggcgcggtgtcggcgcgctacgtgctgcccgacgaggcggcgcgcgcgcggctcctgcaggagggcggcggcggcgtcgcggccgtggtggtgctggaccagggcagccgccactggcagaagctgcgagaggagagcgccgcgcgtgtcgtcctcacctcgctactcgcttgcctacccgccggcccgcgggtctacttcctcaaagggggatatgagactttctactcggaatatcctgagtgttgcgtggatgtaaaacccatttcacaagagaagattgagagtgagagagccctcatcagccagtgtggaaaaccagtggtaaatgtcagctacaggccagcttatgaccagggtggcccagttgaaatccttcccttcctctaccttggaagtgcctaccatgcatccaagtgcgagttcctcgccaacttgcacatcacagccctgctgaatgtctcccgacggacctccgaggcctgcatgacccacctacactacaaatggatccctgtggaagacagccacacggctgacattagctcccactttcaagaagcaatagacttcattgactgtgtcagggaaaagggaggcaaggtcctggtccactgtgaggctgggatctcccgttcacccaccatctgcatggcttaccttatgaagaccaagcagttccgcctgaaggaggccttcgattacatcaagcagaggaggagcatggtctcgcccaactttggcttcatgggccagctcctgcagtacgaatctgagatcctgccctccacgcccaacccccagcctccctcctgccaaggggaggcagcaggctcttcactgataggccatttgcagacactgagccctgacatgcagggtgcctactgcacattccctgcctcggtgctggcaccggtgcctacccactcaacagtctcagagctcagcagaagccctgtggcaacggccacatcctgctaaaactgggatggaggaatcggcccagccccaagagcaactgtgatttttgtttttaagactcatggacatttcatacctgtgcaatactgaagacctcattctgtcatgctgccccagtgagatagtgagtggtcaccaggcttgcaaatgaacttcagacggacctcagggtaggttctcgggactgaaggaaggccaagccattacgggagcacagcatgtgctgactactgtacttccagacccctgccctcttgggactgcccagtccttgcacctcagagttcgccttttcatttcaagcataagccaataaatacctgcagcaacgtgggagaaagaagttgctggaccaggagaaaaggcagttatgaagccaattcattttgaaggaagcacaatttccaccttattttttgaactttggcagtttcaatgtctgtctctgttgcttcggggcataagctgatcaccgtctagttgggaaagtcaccctacagggtttgtagggacatgatcagcatcctgatttgaaccctgaaatgttgtgtagacaccctcttgggtccaatgaggtagttggttgaagtagcaagatgttggcttttctggattttttttgccatgggttcttcactgaccttggactttggcatgattcttagtcatacttgaacttgtctcattccacctcttctcagagcaactcttcctttgggaaaagagttcttcagatcatagaccaaaaaagtcataccttcgaggtggtagcagtagattccaggaggagaagggtacttgctaggtatcctgggtcagtggcggtgcaaactggtttcctcagctgcctgtccttctgtgtgcttatgtctcttgtgacaattgttttcctccctgcccctggaggttgtcttcaactgtggacttctgggatttgcagattttgcaacgtggtactacttttttttctttttgtctgttagttatttctccaggggaaaaggcaataattttctaagacccgtgtgaatgtgaagaaaagcagtatgttactggttgttgttgttgttcttgttttttatatgtaaaataaaaatagtgaaaggag

SEQ ID NO: 265 - DNA, 932 bp, Homo sapiens
  misc_feature (25)..(25): n = a, c, g, or t
  misc_feature (457)..(457): n = a, c, g, or t
  misc_feature (486)..(486): n = a, c, g, or t
  misc_feature (530)..(530): n = a, c, g, or t
  misc_feature (543)..(543): n = a, c, g, or t
  misc_feature (560)..(560): n = a, c, g, or t
  misc_feature (562)..(562): n = a, c, g, or t
  misc_feature (570)..(570): n = a, c, g, or t
  misc_feature (572)..(587): n = a, c, g, or t
  misc_feature (602)..(602): n = a, c, g, or t
  misc_feature (615)..(615): n = a, c, g, or t
  misc_feature (628)..(628): n = a, c, g, or t
  misc_feature (631)..(631): n = a, c, g, or t
  misc_feature (650)..(650): n = a, c, g, or t
  misc_feature (675)..(675): n = a, c, g, or t
  misc_feature (691)..(693): n = a, c, g, or t
  misc_feature (708)..(708): n = a, c, g, or t
  misc_feature (723)..(724): n = a, c, g, or t
  misc_feature (730)..(730): n = a, c, g, or t
  misc_feature (740)..(740): n = a, c, g, or t
  misc_feature (760)..(760): n = a, c, g, or t
  misc_feature (767)..(767): n = a, c, g, or t
  misc_feature (769)..(769): n = a, c, g, or t
  misc_feature (785)..(785): n = a, c, g, or t
  misc_feature (795)..(798): n = a, c, g, or t
  misc_feature (805)..(805): n = a, c, g, or t
  misc_feature (810)..(810): n = a, c, g, or t
  misc_feature (816)..(816): n = a, c, g, or t
  misc_feature (831)..(831): n = a, c, g, or t
  misc_feature (835)..(835): n = a, c, g, or t
  misc_feature (841)..(841): n = a, c, g, or t
  misc_feature (848)..(849): n = a, c, g, or t
  misc_feature (862)..(865): n = a, c, g, or t
  misc_feature (867)..(867): n = a, c, g, or t
  misc_feature (876)..(876): n = a, c, g, or t
  misc_feature (908)..(908): n = a, c, g, or t
  misc_feature (917)..(917): n = a, c, g, or t
  misc_feature (923)..(923): n = a, c, g, or t
  misc_feature (925)..(925): n = a, c, g, or t
  misc_feature (928)..(931): n = a, c, g, or t
ctccaccaacacccccgtttgcctnacaccaccccccttttacttagtatgtttattttttgtgtgtctcttgccttcctcccacgttttatttcccctcagagctgtgaatgggcaggtctgtctctggtttggcatcactgagtttttcccatgcattggccccagggctgctaggatgtgagacaaatctccctacaatgggcttgctcccattgtctgtacagtttaatagatgctggcatgtcggaggttacccatgagtcaaaatccgctctccatgcttactcttgacaccccattgaagccactcattgtgtgtgcgtctgggtgtgaagtccagctccgtgtggtcctgtgcttgtactgccctgctttgcagttcctttgcacttactcatcgagtgctgttttgaaatgctgacattatataaacgtaaaaggaaatgtaaaaaanaaaaacccacacacaaacaaaacccatanggttctggatttggaaaatacacggggtccggacaaaggattanctaaaataaaaanttaaaggttttccaccntnaaaaaganannnnnnnnnnnnnnnnaaaaaaaaaaacccngagggggggcccngggacccaaattncgncccaaaaaggggggcgggnttaaaaaatccactgggccggcggntttaaaaaaggccggnnnctgggggaaaccccnggggggtaccccaannttaaancggccttggngggaaaaccccccccttttnggcaaantnggggggaaaatccganaaagggcccnnnnccgggtnggccnttcccnaaaaaaggttgggcncccntaaaantgggggnntggggaaatttgnnnngngggaaaaanttttgggaaaaaatcccggggaaaaatttttnggaaaaccnggccgntnttnnnnc

SEQ ID NO: 266 - protein, 527 aa, Homo sapiens
MENQEKASIAGHMFDVVVIGGGISGLSAAKLLTEYGVSVLVLEARDRVGGRTYTIRNEHVDYVDVGGAYVGPTQNRILRLSKELGIETYKVNVSERLVQYVKGKTYPFRGAFPPVWNPIAYLDYNNLWRTIDNMGKEIPTDAPWEAQHADKWDKMTMKELIDKICWTKTARRFAYLFVNINVTSEPHEVSALWFLWYVKQCGGTTRIFSVTNGGQERKFVGGSGQVSERIMDLLGDQVKLNHPVTHVDQSSDNIIIETLNHEHYECKYVINAIPPTLTAKIHFRPELPAERNQLIQRLPMGAVIKCMMYYKEAFWKKKDYCGCMIIEDEDAPISITLDDTKPDGSLPAIMGFILARKADRLAKLHKEIRKKKICELYAKVLGSQEALHPVHYEEKNWCEEQYSGGCYTAYFPPGIMTQYGRVIRQPVGRIFFAGTETATKWSGYMEGAVEAGERAAREVLNGLGKVTEKDIWVQEPESKDVPAVEITHTFWERNLPSVSGLLKIIGFSTSVTALGFVLYKYKLLPRS

SEQ ID NO: 267 - DNA, 1925 bp, Homo sapiens
ctgacacgctcctgggtcgtaggcacaggagtgggggccaaagcatggagaatcaagagaaggcgagtatcgcgggccacatgttcgacgtagtcgtgatcggaggtggcatttcaggactatctgctgccaaactcttgactgaatatggcgttagtgttttggttttagaagctcgggacagggttggaggaagaacatatactataaggaatgagcatgttgattacgtagatgttggtggagcttatgtgggaccaacccaaaacagaatcttacgcttgtctaaggagctgggcatagagacttacaaagtgaatgtcagtgagcgtctcgttcaatatgtcaaggggaaaacatatccatttcggggcgcctttccaccagtatggaatcccattgcatatttggattacaataatctgtggaggacaatagataacatggggaaggagattccaactgatgcaccctgggaggctcaacatgctgacaaatgggacaaaatgaccatgaaagagctcattgacaaaatctgctggacaaagactgctaggcggtttgcttatctttttgtgaatatcaatgtgacctctgagcctcacgaagtgtctgccctgtggttcttgtggtatgtgaagcagtgcgggggcaccactcggatattctctgtcaccaatggtggccaggaacggaagtttgtaggtggatctggtcaagtgagcgaacggataatggacctcctcggagaccaagtgaagctgaaccatcctgtcactcacgttgaccagtcaagtgacaacatcatcatagagacgctgaaccatgaacattatgagtgcaaatacgtaattaatgcgatccctccgaccttgactgccaagattcacttcagaccagagcttccagcagagagaaaccagttaattcagcgtcttccaatgggagctgtcattaagtgcatgatgtattacaaggaggccttctggaagaagaaggattactgtggctgcatgatcattgaagatgaagatgctccaatttcaataaccttggatgacaccaagccagatgggtcactgcctgccatcatgggcttcattcttgcccggaaagctgatcgacttgctaagctacataaggaaataaggaagaagaaaatctgtgagctctatgccaaagtgctgggatcccaagaagctttacatccagtgcattatgaagagaagaactggtgtgaggagcagtactctgggggctgctacacggcctacttccctcctgggatcatgactcaatatggaagggtgattcgtcaacccgtgggcaggattttctttgcgggcacagagactgccacaaagtggagcggctacatggaaggggcagttgaggctggagaacgagcagctagggaggtcttaaatggtctcgggaaggtgaccgagaaagacatctgggtacaagaacctgaatcaaaggacgttccagcggtagaaatcacccacaccttctgggaaaggaacctgccctctgtttctggcctgctgaagatcattggattttccacatcagtaactgccctggggtttgtgctgtacaaatacaagctcctgccacggtcttgaagttctgttcttatgctctctgctcactggttttcaataccaccaagaggaaaatattgacaagtttaaaggctgtgtcattgggccatgtttaagtgtactggatttaactacctttggcttaattccaatcattgttaaagtaaaaacaattcaaagaatcacctaattaatttcagtaagatcaagctccatcttatttgtcagtgtagatcaactcatgttaattgatagaataaagccttgtgatcactttctgaaattcacaaagttaaacgtgatgtgctcatcagaaac

SEQ ID NO: 268 - protein, 321 aa, Homo sapiens
MSEQSKDLSDPNFAAEAPNSEVHSSPGVSEGVPPSATLAEPQSPPLGPTAAPQAAPPPQAPNDEGDPKALQQAAEEGRAHQAPSAAQPGPAPPAPAQLVQKAHELMWYVLVKDQKKMIIWFPDMVKDVIGSYKKWCRSILRRTSLILARVFGLHLRLTSLHTMEFALVKALEPEELDRVALSNRMPMTGLLLMILSLIYVKGRGARESAVWNVLRILGLRPWKKHSTFGDVRKLITEEFVQMNYLKYQRVPYVEPPEYEFFWGSRASREITKMQIMEFLARVFKKDPQAWPSRYREALEEARALREANPTAHYPRSSVSED

SEQ ID NO: 269 - DNA, 1897 bp, Homo sapiens
acttcctctccaggaatccgcggagggagcgcaggctcgaagagctcctggacgcagaggccctgcccttgccagacggcgcagacatgtcagaacaaagtaaggatctgagcgaccctaactttgcagccgaggcccccaactccgaggtgcacagcagccctggggtttcggagggggttcctccgtccgcgaccctggcagagccgcagagccctcctctaggcccgacggccgctccgcaggccgcgccgcctccccaggccccgaacgacgagggcgacccgaaggccctgcagcaggctgcggaggagggccgcgcccaccaggccccgagcgcggcccagccgggcccggcaccgccagccccggcgcagctggtgcagaaggcgcacgagctcatgtggtacgtgctggtcaaggaccagaagaagatgatcatctggtttccagacatggtgaaagatgtcatcggcagctacaagaagtggtgcaggagcatcctccggcgcaccagcctcatcctcgcccgggtgttcgggctgcacctgaggctaaccagcctgcacaccatggagtttgcgctggtcaaagcgctggagcccgaggagctggacagggtggcgctgagcaaccgcatgcccatgacaggcctcctgctcatgatcctgagcctcatctacgtgaagggccgcggcgccagagagagcgccgtctggaacgtgctgcgcatcctggggctgcggccctggaagaagcactccaccttcggggacgtgcggaagctcatcactgaggagttcgtccaaatgaattacctgaagtaccagcgcgtcccatacgtggagccgcccgaatacgagttcttttggggctcccgggccagccgcgaaatcaccaagatgcaaatcatggagttcctggccagggtctttaagaaagacccccaggcctggccctcccgatacagagaagctctggaggaggccagagctctgcgggaggctaatcccactgcccactaccctcgcagcagtgtctctgaggactagcaaagtctggaggcagatgaatggtttctgaccctcaccagggctgtggaagggtgggggtgggtcattatagtattcaggatttacagtgcagtattcacgtgtaacttttaagttttcagtacagtgcttttatacctttaatgcaatgttgtattcatttgggtactattgtgtagtatttaggatgtatgcatgtttgtttatatgtaagcttggttggtgctttcgcttttgtgctacctttcttggatttttgtaccagagatgtgctaaactgatgaaatacattgagaaagtttccatcttattcttttatatgggactgatgatgtgtgttggggtagactgctcctgcagagtttggaagaagtcaccagcaaagccggcctaaccaagaaaagtcaaggcccttcatgaccttgctgggcacagaaaacaccctcgtggagtacactaatttgaactggactggtctcagtgtgagcacttggcacactttactaaacacatatacaaccccaccgtgagtcaactttaaagtaaacattaaagattcttgtgatacaatcatttttggaaaagtgtactttatcattttaacaaagcagtatggttgggaatgagacaattctctattttacagtgtatacagatacaactatttcccctaatagggtgggaaaaatcgctactcatgattactcctaaatttgtgaagtttatagttctattgtctttaaatgtaactcatgtttatttcaaaaacattcacaaatatagaaaagtatacaaaacaaaacagtaagattgtctgtaatcacatcatatgggaataaaaaaca

SEQ ID NO: 270 - protein, 617 aa, Homo sapiens
MSSLPTSDGFNHPARSSGQSPDVGNPMSLARSVSASVCPIKPSDSDRIEPKAVKALKASAEFQLNSEKKEHLSLQDLSDHASSADHAPTDQSPAMPMQNSSEEITVAGNLEKSAERSTQGLKFHLHTRQEASLSVTSTRMHEPQMFLGEKDWHPENQNLSQVSDPQQHEEPGNEQYEVAQQKASHDQEYLCNIGDLELPEERQQNQHKIVDLEATMKGNGLPQNVDPPSAKKSIPSSECSGCSNSETFMEIDTAQQSLVTLLNSTGRQNANVKNIGALDLTLDNPLMEVETSKCNPSSEILNDSISTQDLQPPETNVEIPGTNKEYGHYSSPSLCGSCQPSVESAEESCPSITAALKELHELLVVSSKPASENTSEEVICQSETIAEGQTSIKDLSERWTQNEHLTQNEQCPQVSFHQAISVSVETEKLTGTSSDTGREAVENVNFRSLGDGLSTDKEGVPKSRESINKNRSVTVTSAKTSNQLHCTLGVEISPKLLAGEEDALNQTSEQTKSLSSNFILVKDLGQGIQNSVTDRPETRENVCPDASRPLLEYEPPTSHPSSSPAILPPLIFPATDIDRILRAGFTLQEALGALHRVGGNADLALLVLLAKNIVVPT

SEQ ID NO: 271 - DNA, 1854 bp, Homo sapiens
atgtcatcattaccaacttcagatgggtttaaccatcccgcccgttcttcaggacagagtcctgatgttggtaatcctatgagtcttgctcgctctgtctctgcttcagtctgccctatcaagcccagtgactcagatcgcattgaacctaaagctgtgaaggctttgaaggcttcagctgaattccagctaaactctgaaaagaaagaacatctttctttacaagatctttctgatcatgcttcctcagcagaccatgctccaacagaccagagtccagctatgcctatgcagaattcatccgaagaaataactgttgcaggtaatctggagaaatctgctgaaagaagcacccagggcctcaaatttcatctccatacaagacaggaagctagtttatctgtcacatctactaggatgcatgaaccacagatgtttctaggtgaaaaggattggcatccagaaaatcagaacctgagtcaagtgagtgaccctcagcagcacgaagaaccagggaatgaacagtatgaggttgcacaacaaaaagcttcacatgaccaagaatatctttgtaacataggggaccttgagcttcctgaagaaaggcaacagaatcaacacaaaattgttgatttggaagctacgatgaaaggaaatgggctcccacagaatgtggatcctccaagtgcgaagaaaagtattccatcttcagaatgcagtggctgctcaaattcagaaacatttatggaaatcgatacagctcaacagtccctagttactttgcttaattcaacaggcaggcagaatgccaatgtcaagaacattggtgcattggatctcactttagataatcccttgatggaagtagaaacatcaaaatgtaacccttcatctgaaattttgaatgattccatttccactcaggatttacagcccccagaaactaatgttgaaatacctggaacaaataaagaatatggccattactcctctccaagtctctgtggcagttgtcagccttctgtggagtcagcagaagaatcttgcccgtctataacggcagccttgaaagaacttcatgaacttttggttgttagcagtaaaccagcttcagaaaatacatctgaagaagtaatctgtcaatcagaaaccatagctgagggccaaaccagtattaaagacctttctgaaagatggacccaaaatgagcatcttacccagaatgaacagtgtccacaagtctcctttcatcaggccatatctgtatcagtggagacagaaaaattaacaggtacttcatctgacactggaagagaagctgtagaaaatgtaaacttcaggagtctaggtgatggcctgtcaaccgataaggaaggtgtccccaaatctagggaatccataaataagaaccgttctgtcactgtaacctcagctaaaacatccaatcagttacactgcaccttaggtgtagaaatttcacccaaacttttagcaggtgaggaggatgcactcaatcagacttctgagcaaactaagtctttgtcatccaatttcatattggttaaagacttaggtcagggcatacagaattcagtaacagacaggcctgaaaccagagaaaatgtctgtcctgatgcttcgaggccattacttgaatatgaaccacctaccagccatccatcatcaagtcctgccattcttccaccattgatttttcctgccacagatattgaccgcattctccgtgctggctttactttgcaggaagctcttggagctttgcatcgagttggtgggaatgcagaccttgcacttcttgttttgctcgcaaaaaacatcgtagttcctacatga

SEQ ID NO: 272 - protein, 857 aa, Homo sapiens
MESEDLSGRELTIDSIMNKVRDIKNKFKNEDLTDELSLNKISADTTDNSGTVNQIMMMANNPEDWLSLLLKLEKNSVPLSDALLNKLIGRYSQAIEALPPDKYGQNESFARIQVRFAELKAIQEPDDARDYFQMARANCKKFAFVHISFAQFELSQGNVKKSKQLLQKAVERGAVPLEMLEIALRNLNLQKKQLLSEEEKKNLSASTVLTAQESFSGSLGHLQNRNNSCDSRGQTTKARFLYGENMPPQDAEIGYRNSLRQTNKTKQSCPFGRVPVNLLNSPDCDVKTDDSVVPCFMKRQTSRSECRDLVVPGSKPSGNDSCELRNLKSVQNSHFKEPLVSDEKSSELIITDSITLKNKTESSLLAKLEETKEYQEPEVPESNQKQWQSKRKSECINQNPAASSNHWQIPELARKVNTEQKHTTFEQPVFSVSKQSPPISTSKWFDPKSICKTPSSNTLDDYMSCFRTPVVKNDFPPACQLSTPYGQPACFQQQQHQILATPLQNLQVLASSSANECISVKGRIYSILKQIGSGGSSKVFQVLNEKKQIYAIKYVNLEEADNQTLDSYRNEIAYLNKLQQHSDKIIRLYDYEITDQYIYMVMECGNIDLNSWLKKKKSIDPWERKSYWKNMLEAVHTIHQHGIVHSDLKPANFLIVDGMLKLIDFGIANQMQPDTTSVVKDSQVGTVNYMPPEAIKDMSSSRENGKSKSKISPKSDVWSLGCILYYMTYGKTPFQQIINQISKLHAIIDPNHEIEFPDIPEKDLQDVLKCCLKRDPKQRISIPELLAHPYVQIQTHPVNQMAKGTTEEMKYVLGQLVGLNSPNSILKAAKTLYEHYSGGESHNSSSSKTFEKKRGKK

SEQ ID NO: 273 - DNA, 2993 bp, Homo sapiens
ggcacgaggggaaattcaaacgtgtttgcggaaaggagtttgggttccatcttttcatttccccagcgcagctttctgtagaaatggaatccgaggatttaagtggcagagaattgacaattgattccataatgaacaaagtgagagacattaaaaataagtttaaaaatgaagaccttactgatgaactaagcttgaataaaatttctgctgatactacagataactcgggaactgttaaccaaattatgatgatggcaaacaacccagaggactggttgagtttgttgctcaaactagagaaaaacagtgttccgctaagtgatgctcttttaaataaattgattggtcgttacagtcaagcaattgaagcgcttcccccagataaatatggccaaaatgagagttttgctagaattcaagtgagatttgctgaattaaaagctattcaagagccagatgatgcacgtgactactttcaaatggccagagcaaactgcaagaaatttgcttttgttcatatatcttttgcacaatttgaactgtcacaaggtaatgtcaaaaaaagtaaacaacttcttcaaaaagctgtagaacgtggagcagtaccactagaaatgctggaaattgccctgcggaatttaaacctccaaaaaaagcagctgctttcagaggaggaaaagaagaatttatcagcatctacggtattaactgcccaagaatcattttccggttcacttgggcatttacagaataggaacaacagttgtgattccagaggacagactactaaagccaggtttttatatggagagaacatgccaccacaagatgcagaaataggttaccggaattcattgagacaaactaacaaaactaaacagtcatgcccatttggaagagtcccagttaaccttctaaatagcccagattgtgatgtgaagacagatgattcagttgtaccttgttttatgaaaagacaaacctctagatcagaatgccgagatttggttgtgcctggatctaaaccaagtggaaatgattcctgtgaattaagaaatttaaagtctgttcaaaatagtcatttcaaggaacctctggtgtcagatgaaaagagttctgaacttattattactgattcaataaccctgaagaataaaacggaatcaagtcttctagctaaattagaagaaactaaagagtatcaagaaccagaggttccagagagtaaccagaaacagtggcaatctaagagaaagtcagagtgtattaaccagaatcctgctgcatcttcaaatcactggcagattccggagttagcccgaaaagttaatacagagcagaaacataccacttttgagcaacctgtcttttcagtttcaaaacagtcaccaccaatatcaacatctaaatggtttgacccaaaatctatttgtaagacaccaagcagcaataccttggatgattacatgagctgttttagaactccagttgtaaagaatgactttccacctgcttgtcagttgtcaacaccttatggccaacctgcctgtttccagcagcaacagcatcaaatacttgccactccacttcaaaatttacaggttttagcatcttcttcagcaaatgaatgcatttcggttaaaggaagaatttattccattttaaagcagataggaagtggaggttcaagcaaggtatttcaggtgttaaatgaaaagaaacagatatatgctataaaatatgtgaacttagaagaagcagataaccaaactcttgatagttaccggaacgaaatagcttatttgaataaactacaacaacacagtgataagatcatccgactttatgattatgaaatcacggaccagtacatctacatggtaatggagtgtggaaatattgatcttaatagttggcttaaaaagaaaaaatccattgatccatgggaacgcaagagttactggaaaaatatgttagaggcagttcacacaatccatcaacatggcattgttcacagtgatcttaaaccagctaactttctgatagttgatggaatgctaaagctaattgattttgggattgcaaaccaaatgcaaccagatacaacaagtgttgttaaagattctcaggttggcacagttaattatatgccaccagaagcaatcaaagatatgtcttcctccagagagaatgggaaatctaagtcaaagataagccccaaaagtgatgtttggtccttaggatgtattttgtactatatgacttacgggaaaacaccatttcagcagataattaatcagatttctaaattacatgccataattgatcctaatcatgaaattgaatttcccgatattccagagaaagatcttcaagatgtgttaaagtgttgtttaaaaagggacccaaaacagaggatatccattcctgagctcctggctcatccctatgttcaaattcaaactcatccagttaaccaaatggccaagggaaccactgaagaaatgaaatatgttctgggccaacttgttggtctgaattctcctaactccattttgaaagctgctaaaactttatatgaacactatagtggtggtgaaagtcataattcttcatcctccaagacttttgaaaaaaaaaggggaaaaaaatgatttgcagttattcgtaatgtcaaataccacctataaaatatattggactgttatactcttgaatccctgtggaaatctacatttgaagacaacatcactctgaagtgttatcagcaaaaaaaattcagtagattatctttaaaagaaaactgtaaaaatagcaaccacttatggtactgtatatattgtagacttgttttctctgttttatgctcttgtgtaatctacttgacatcattttactcttggaatagtgggtggatagcaagtatattctaaaaaactttgtaaataaagttttgtggctaaaatgacactaaaaaaaaaaaaaaaaaa

SEQ ID NO: 274 - protein, 1298 aa, Homo sapiens
MQRGAALCLRLWLCLGLLDGLVSDYSMTPPTLNITEESHVIDTGDSLSISCRGQHPLEWAWPGAQEAPATGDKDSEDTGVVRDCEGTDARPYCKVLLLHEVHANDTGSYVCYYKYIKARIEGTTAASSYVFVRDFEQPFINKPDTLLVNRKDAMWVPCLVSIPGLNVTLRSQSSVLWPDGQEVVWDDRRGMLVSTPLLHDALYLQCETTWGDQDFLSNPFLVHITGNELYDIQLLPRKSLELLVGEKLVLNCTVWAEFNSGVTFDWDYPGKQAERGKWVPERRSQQTHTELSSILTIHNVSQHDLGSYVCKANNGIQRFRESTEVIVHENPFISVEWLKGPILEATAGDELVKLPVKLAAYPPPEFQWYKDGKALSGRHSPHALVLKEVTEASTGTYTLALWNSAAGLRRNISLELVVNVPPQIHEKEASSPSIYSRHSRQALTCTAYGVPLPLSIQWHWRPWTPCKMFAQRSLRRRQQQDLMPQCRDWRAVTTQDAVNPIESLDTWTEFVEGKNKTVSKLVIQNANVSAMYKCVVSNKVGQDERLIYFYVTTIPDGFTIESKPSEELLEGQPVLLSCQADSYKYEHLRWYRLNLSTLHDAHGNPLLLDCKNVHLFATPLAASLEEVAPGARHATLSLSIPRVAPEHEGHYVCEVQDRRSHDKHCHKKYLSVQALEAPRLTQNLTDLLVNVSDSLEMQCLVAGAHAPSIVWYKDERLLEEKSGVDLADSNQKLSIQRVREEDAGPYLCSVCRPKGCVNSSASVAVEGSEDKGSMEIVILVGTGVIAVFFWVLLLLIFCNMRRPAHADIKTGYLSIIMDPGEVPLEEQCEYLSYDASQWEFPRERLHLGRVLGYGAFGKVVEASAFGIHKGSSCDTVAVKMLKEGATASEQRALMSELKILIHIGNHLNVVNLLGACTKPQGPLMVIVEFCKYGNLSNFLRAKRDAFSPCAEKSPEQRGRFRAMVELARLDRRRPGSSDRVLFARFSKTEGGARRASPDQEAEDLWLSPLTMEDLVCYSFQVARGMEFLASRKCIHRDLAARNILLSESDVVKICDFGLARDIYKDPDYVRKGSARLPLKWMAPESIFDKVYTTQSDVWSFGVLLWEIFSLGASPYPGVQINEEFCQRVRDGTRMRAPELATPAIRHIMLNCWSGDPKARPAFSDLVEILGDLLQGRGLQEEEEVCMAPRSSQSSEEGSFSQVSTMALHIAQADAEDSPPSLQRHSLAARYYNWVSFPGCLARGAETRGSSRMKTFEEFPMTPTTYKGSVDNQTDSGMVLASEEFEQIESRHRQESGFR

SEQ ID NO: 275 - DNA, 4450 bp, Homo sapiens
acccacgcgcagcggccggagatgcagcggggcgccgcgctgtgcctgcgactgtggctctgcctgggactcctggacggcctggtgagtgactactccatgacccccccgaccttgaacatcacggaggagtcacacgtcatcgacaccggtgacagcctgtccatctcctgcaggggacagcaccccctcgagtgggcttggccaggagctcaggaggcgccagccaccggagacaaggacagcgaggacacgggggtggtgcgagactgcgagggcacagacgccaggccctactgcaaggtgttgctgctgcacgaggtacatgccaacgacacaggcagctacgtctgctactacaagtacatcaaggcacgcatcgagggcaccacggccgccagctcctacgtgttcgtgagagactttgagcagccattcatcaacaagcctgacacgctcttggtcaacaggaaggacgccatgtgggtgccctgtctggtgtccatccccggcctcaatgtcacgctgcgctcgcaaagctcggtgctgtggccagacgggcaggaggtggtgtgggatgaccggcggggcatgctcgtgtccacgccactgctgcacgatgccctgtacctgcagtgcgagaccacctggggagaccaggacttcctttccaaccccttcctggtgcacatcacaggcaacgagctctatgacatccagctgttgcccaggaagtcgctggagctgctggtaggggagaagctggtcctcaactgcaccgtgtgggctgagtttaactcaggtgtcacctttgactgggactacccagggaagcaggcagagcggggtaagtgggtgcccgagcgacgctcccaacagacccacacagaactctccagcatcctgaccatccacaacgtcagccagcacgacctgggctcgtatgtgtgcaaggccaacaacggcatccagcgatttcgggagagcaccgaggtcattgtgcatgaaaatcccttcatcagcgtcgagtggctcaaaggacccatcctggaggccacggcaggagacgagctggtgaagctgcccgtgaagctggcagcgtaccccccgcccgagttccagtggtacaaggatggaaaggcactgtccgggcgccacagtccacatgccctggtgctcaaggaggtgacagaggccagcacaggcacctacaccctcgccctgtggaactccgctgctggcctgaggcgcaacatcagcctggagctggtggtgaatgtgcccccccagatacatgagaaggaggcctcctcccccagcatctactcgcgtcacagccgccaggccctcacctgcacggcctacggggtgcccctgcctctcagcatccagtggcactggcggccctggacaccctgcaagatgtttgcccagcgtagtctccggcggcggcagcagcaagacctcatgccacagtgccgtgactggagggcggtgaccacgcaggatgccgtgaaccccatcgagagcctggacacctggaccgagtttgtggagggaaagaataagactgtgagcaagctggtgatccagaatgccaacgtgtctgccatgtacaagtgtgtggtctccaacaaggtgggccaggatgagcggctcatctacttctatgtgaccaccatccccgacggcttcaccatcgaatccaagccatccgaggagctactagagggccagccggtgctcctgagctgccaagccgacagctacaagtacgagcatctgcgctggtaccgcctcaacctgtccacgctgcacgatgcgcacgggaacccgcttctgctcgactgcaagaacgtgcatctgttcgccacccctctggccgccagcctggaggaggtggcacctggggcgcgccacgccacgctcagcctgagtatcccccgcgtcgcgcccgagcacgagggccactatgtgtgcgaagtgcaagaccggcgcagccatgacaagcactgccacaagaagtacctgtcggtgcaggccctggaagcccctcggctcacgcagaacttgaccgacctcctggtgaacgtgagcgactcgctggagatgcagtgcttggtggccggagcgcacgcgcccagcatcgtgtggtacaaagacgagaggctgctggaggaaaagtctggagtcgacttggcggactccaaccagaagctgagcatccagcgcgtgcgcgaggaggatgcgggaccgtatctgtgcagcgtgtgcagacccaagggctgcgtcaactcctccgccagcgtggccgtggaaggctccgaggataagggcagcatggagatcgtgatccttgtcggtaccggcgtcatcgctgtcttcttctgggtcctcctcctcctcatcttctgtaacatgaggaggccggcccacgcagacatcaagacgggctacctgtccatcatcatggaccccggggaggtgcctctggaggagcaatgcgaatacctgtcctacgatgccagccagtgggaattcccccgagagcggctgcacctggggagagtgctcggctacggcgccttcgggaaggtggtggaagcctccgctttcggcatccacaagggcagcagctgtgacaccgtggccgtgaaaatgctgaaagagggcgccacggccagcgagcagcgcgcgctgatgtcggagctcaagatcctcattcacatcggcaaccacctcaacgtggtcaacctcctcggggcgtgcaccaagccgcagggccccctcatggtgatcgtggagttctgcaagtacggcaacctctccaacttcctgcgcgccaagcgggacgccttcagcccctgcgcggagaagtctcccgagcagcgcggacgcttccgcgccatggtggagctcgccaggctggatcggaggcggccggggagcagcgacagggtcctcttcgcgcggttctcgaagaccgagggcggagcgaggcgggcttctccagaccaagaagctgaggacctgtggctgagcccgctgaccatggaagatcttgtctgctacagcttccaggtggccagagggatggagttcctggcttcccgaaagtgcatccacagagacctggctgctcggaacattctgctgtcggaaagcgacgtggtgaagatctgtgactttggccttgcccgggacatctacaaagaccccgactacgtccgcaagggcagtgcccggctgcccctgaagtggatggcccctgaaagcatcttcgacaaggtgtacaccacgcagagtgacgtgtggtcctttggggtgcttctctgggagatcttctctctgggggcctccccgtaccctggggtgcagatcaatgaggagttctgccagcgcgtgagagacggcacaaggatgagggccccggagctggccactcccgccatacgccacatcatgctgaactgctggtccggagaccccaaggcgagacctgcattctcggacctggtggagatcctgggggacctgctccagggcaggggcctgcaagaggaagaggaggtctgcatggccccgcgcagctctcagagctcagaagagggcagcttctcgcaggtgtccaccatggccctacacatcgcccaggctgacgctgaggacagcccgccaagcctgcagcgccacagcctggccgccaggtattacaactgggtgtcctttcccgggtgcctggccagaggggctgagacccgtggttcctccaggatgaagacatttgaggaattccccatgaccccaacgacctacaaaggctctgtggacaaccagacagacagtgggatggtgctggcctcggaggagtttgagcagatagagagcaggcatagacaagaaagcggcttcaggtagctgaagcagagagagagaaggcagcatacgtcagcattttcttctctgcacttataagaaagatcaaagactttaagactttcgctatttcttctactgctatctactacaaacttcaaagaggaaccaggaggacaagaggagcatgaaagtggacaaggagtgtgaccactgaagcaccacagggaggggttaggcctccggatgactgcgggcaggcctggataatatccagcctcccacaagaagctggtggagcagagtgttccctgactcctccaaggaaagggagacgccctttcatggtctgctgagtaacaggtgccttcccagacactggcgttactgcttgaccaaagagccctcaagcggcccttatgccagcgtgacagagggctcacctcttgccttctaggtcacttctcacaatgtcccttcagcacctgaccctgtgcccgccgattattccttggtaatatgagtaatacatcaaagagtagtattaaaagctaattaatcatgtttataaaaa

SEQ ID NO: 276 - protein, 416 aa, Homo sapiens
MPRQLSAAAALFASLAVILHDGSQMRAKAFPETRDYSQPTAAATVQDIKKPVQQPAKQAPHQTLAARFMDGHITFQTAATVKIPTTTPATTKNTATTSPITYTLVTTQATPNNSHTAPPVTEVTVGPSLAPYSLPPTITPPAHTAGTSSSTVSHTTGNTTQPSNQTTLPATLSIALHKSTTGQKPDQPTHAPGTTAAAHNTTRTAAPASTVPGPTLAPQPSSVKTGIYQVLNGSRLCIKAEMGIQLIVQDKESVFSPRRYFNIDPNATQASGNCGTRKSNLLLNFQGGFVNLTFTKDEESYYISEVGAYLTVSDPETVYQGIKHAVVMFQTAVGHSFKCVSEQSLQLSAHLQVKTTDVQLQAFDFEDDHFGNVDECSSDYTIVLPVIGAIVVGLCLMGMGVYKIRLRCQSSGYQRI

SEQ ID NO: 277 - DNA, 3178 bp, Homo sapiens
ggcaccgattcggggcctgcccggacttcgccgcacgctgcagaacctcgcccagcgcccaccatgccccggcagctcagcgcggcggccgcgctcttcgcgtccctggccgtaattttgcacgatggcagtcaaatgagagcaaaagcatttccagaaaccagagattattctcaacctactgcagcagcaacagtacaggacataaaaaaacctgtccagcaaccagctaagcaagcacctcaccaaactttagcagcaagattcatggatggtcatatcacctttcaaacagcggccacagtaaaaattccaacaactaccccagcaactacaaaaaacactgcaaccaccagcccaattacctacaccctggtcacaacccaggccacacccaacaactcacacacagctcctccagttactgaagttacagtcggccctagcttagccccttattcactgccacccaccatcaccccaccagctcatacagctggaaccagttcatcaaccgtcagccacacaactgggaacaccactcaacccagtaaccagaccacccttccagcaactttatcgatagcactgcacaaaagcacaaccggtcagaagcctgatcaacccacccatgccccaggaacaacggcagctgcccacaataccacccgcacagctgcacctgcctccacggttcctgggcccacccttgcacctcagccatcgtcagtcaagactggaatttatcaggttctaaacggaagcagactctgtataaaagcagagatggggatacagctgattgttcaagacaaggagtcggttttttcacctcggagatacttcaacatcgaccccaacgcaacgcaagcctctgggaactgtggcacccgaaaatccaaccttctgttgaattttcagggcggatttgtgaatctcacatttaccaaggatgaagaatcatattatatcagtgaagtgggagcctatttgaccgtctcagatccagagacagtttaccaaggaatcaaacatgcggtggtgatgttccagacagcagtcgggcattccttcaagtgcgtgagtgaacagagcctccagttgtcagcccacctgcaggtgaaaacaaccgatgtccaacttcaagcctttgattttgaagatgaccactttggaaatgtggatgagtgctcgtctgactacacaattgtgcttcctgtgattggggccatcgtggttggtctctgccttatgggtatgggtgtctataaaatccgcctaaggtgtcaatcatctggataccagagaatctaattgttgcccggggggaatgaaaataatggaatttagagaactctttcatcccttccaggatggatgttgggaaattccctcagagtgtgggtccttcaaacaatgtaaaccaccatcttctattcaaatgaagtgagtcatgtgtgatttaagttcaggcagcacatcaatttctaaatactttttgtttattttatgaaagatatagtgagctgtttattttctagtttcctttagaatattttagccactcaaagtcaacatttgagatatgttgaattaacataatatatgtaaagtagaataagccttcaaattataaaccaagggtcaattgtaactaatactactgtgtgtgcattgaagattttattttacccttgatcttaacaaagcctttgctttgttatcaaatggactttcagtgcttttactatctgtgttttatggtttcatgtaacatacatattcctggtgtagcacttaactccttttccactttaaatttgtttttgttttttgagacggagtttcactcttgtcacccaggctggagtacagtggcacgatctcggcttatggcaacctccgcctcccgggttcaagtgattctcctgcttcagcttcccgagtagctgggattacaggcacacactaccacgcctggctaatttttgtatttttattatagacgggtttcaccatgttggccagactggtcttgaactcttgacctcaggtgatccacccacctcagcctcccaaagtgctgggattacaggcatgagccattgcgcccggccttaaatgttttttttaatcatcaaaaagaacaacatatctcaggttgtctaagtgtttttatgtaaaaccaacaaaaagaacaaatcagcttatattttttatcttgatgactcctgctccagaattgctagactaagaattaggtggctacagatggtagaactaaacaataagcaagagacaataataatggcccttaattattaacaaagtgccagagtctaggctaagcactttatctatatctcatttcattctcacaacttataagtgaatgagtaaactgagacttaagggaactgaatcacttaaatgtcacctggctaactgatggcagagccagagcttgaattcatgttggtctgacatcaaggtctttggtcttctccctacaccaagttacctacaagaacaatgacaccacactctgcctgaaggctcacacctcataccagcatacgctcaccttacagggaaatgggtttatccaggatcatgagacattagggtagatgaaaggagagctttgcagataacaaaatagcctatccttaataaatcctccactctctggaaggagactgaggggctttgtaaaacattagtcagttgctcatttttatgggattgcttagctgggctgtaaagatgaaggcatcaaataaactcaaagtatttttaaatttttttgataatagagaaacttcgctaaccaactgttctttcttgagtgtatagccccatcttgtggtaacttgctgcttctgcacttcatatccatatttcctattgttcactttattctgtagagcagcctgccaagaattttatttctgctgttttttttgctgctaaagaaaggaactaagtcaggatgttaacagaaaagtccacataaccctagaattcttagtcaaggaataattcaagtcagcctagagaccatgttgactttcctcatgtgtttccttatgactcagtaagttggcaaggtcctgactttagtcttaataaaacattgaattgtagtaaaggtttttgcaataaaaacttactttgg

SEQ ID NO: 278 - protein, 209 aa, Homo sapiens
MGKGDPNKPRGKMSSYAFFVQTCREEHKKKHPDSSVNFAEFSKKCSERWKTMSAKEKSKFEDMAKSDKARYDREMKNYVPPKGDKKGKKKDPNAPKRPPSAFFLFCSEHRPKIKSEHPGLSIGDTAKKLGEMWSEQSAKDKQPYEQKAAKLKEKYEKDIAAYRAKGKSEAGKKGPGRPTGSKKKNEPEDEEEEEEEEDEDEEEEDEDEE

SEQ ID NO: 279 - DNA, 1301 bp, Homo sapiens
aatacgactcactataggggagaccggaattcgagctcggtacccggggatcctctagagatccctcgacctcgagatccattgtgctctaaagttgcgttagagataaaccagttcacgccggagccccgtgagggaagcgtctccgttgggtccggccgctctgcgggactctgaggaaaagctcgcaccaggtggacgcggatctgtcaacatgggtaaaggagaccccaacaagccgcggggcaaaatgtcctcgtacgccttcttcgtgcagacctgccgggaagagcacaagaagaaacacccggactcttccgtcaatttcgcggaattctccaagaagtgttcggagagatggaagaccatgtctgcaaaggagaagtcgaagtttgaagatatggcaaaaagtgacaaagctcgctatgacagggagatgaaaaattacgttcctcccaaaggtgataagaaggggaagaaaaaggaccccaatgctcctaaaaggccaccatctgccttcttcctgttttgctctgaacatcgcccaaagatcaaaagtgaacaccctggcctatccattggggatactgcaaagaaattgggtgaaatgtggtctgagcagtcagccaaagataaacaaccatatgaacagaaagcagctaagctaaaggagaaatatgaaaaggatattgctgcatatcgtgccaagggcaaaagtgaagcaggaaagaagggccctggcaggccaacaggctcaaagaagaagaacgaaccagaagatgaggaggaggaggaggaagaagaagatgaagatgaggaggaagaggatgaagatgaagaataaatggctatcctttaatgatgcgtgtggaatgtgtgtgtgtgctcaggcaattattttgctaagaatgtgaattcaagtgcagctcaatactagcttcagtataaaaactgtacagatttttgtatagctgataagattctctgtagagaaaatacttttaaaaaatgcaggttgtagctttttgatgggctactcatacagttagattttacagcttctgatgttgaatgttcctaaatatttaatggtttttttaatttctgtgtgtatggtagcacagcaaacttgtaggaattagtatcaatagtaaattttgggttttttaggatgttgcatttcgtttttttaaaaaaaattttgtaataaaattatgtatattatttctattgtctttgtcttaatatgctaagttaattttcactttaaaaaagccatttgaagaccaaaaaaaaaaaaa

SEQ ID NO: 280 - skipped

SEQ ID NO: 281 - DNA, 1316 bp, Homo sapiens
aaatagaatcaacttgggttatatttgtcatttactttgttctgttagattttttcagttgtttttggaaaaattctagaaatcaggatgaaaaatgcagcttttccagggttgctggactgggggttttatttgggcctccttattataatttgtcactacttataaaaaacattctgttgcaaacagtggtgttgcattgaattgaactttggcaatgagaacacagcacacagctcccttttcaaaaagggtctcaaccccagtgtgtatttttgtacatcaacatttagaatacttatggcagataagtaaggcatgtcactgtgtccttcagtaacctctctcagtaactggtttctttatccctaacatgaattcatttctcctttgaagtcatttattattttataaattgagaacaaccacaccaccaaatgtcacaccttcttataaagtgtgaacaaggaaggtcatgtttttgtgggtattttgtcagacttagaggtttcatttcagggcatagtcaaaggcatcatcctcccaactacccacttgattatgtatttcagatccctccgtgggggccttcttctgacagagaattctttgaggtacgcagtagtgcttttgtcagcacagactgctaatctacatcttgctgcgttctgtttgctgaggttgggcttattcatttaacacgtaccaaccattatccagaggcaccatggagagttagtcatggaataaagcactgtccttgcagatgaaaaaagtctccagagcagacttctgacaggaaaggtttagatgctggagagttgaagaggtgtaagaagagatcgtgccctcatttttcacttatttttttggttattcatttataataaaaggttggcattgatatggtacaacctgcaaattacttgcagttctgagtttcagataaaacattataaaacattaaattcaatacatactgctcctttgaaatttgggtaaaaaattgtacaaccgtatatatagtcatttttgtattttttctatgttgtgaaaaccaaaattgtaattttataagtctttgattcactaaaattatataatttaaatgtattttttgtatatttagaaataaggagtccagagactacgcttaactttctatgcatgcatttgaaagctgtttttacctgataatgtagtaataagttgtattcataaaatactgatctgtgttgcatttcaaaataaactggtgtgtgctctgcctggatttgaaaaaaaaaaaaaaaaaaaaaaaaaaaaaaaaaaaaaaa

SEQ ID NO: 282 - protein, 461 aa, Homo sapiens [sequence omitted]

SEQ ID NO: 283 - DNA, 3018 bp, Homo sapiens
gcacgagggaacaacctctctctctscagcagagagtgtcacctcctgctttaggaccatcaagctctgctaactgaatctcatcctaattgcaggatcacattgcaaagctttcactctttcccaccttgcttgtgggtaaatctcttctgcggaatctcagaaagtaaagttccatcctgagaatatttcacaaagaatttccttaagagctggactgggtcttgacccctggaatttaagaaattcttaaagacaatgtcaaatatgatccaagagaaaatgtgatttgagtctggagacaattgtgcatatcgtctaataataaaaacccatactagcctatagaaaacaatatttgaataataaaaacccatactagcctatagaaaacaatatttgaaagattgctaccactaaaaagaaaactactacaacttgacaagactgctgcaaacttcaattggtcaccacaacttgacaaggttgctataaaacaagattgctacaacttctagtttatgttatacagcatatttcatttgggcttaatgatggagaaaaagtgtaccctgtattttctggttctcttgcctttttttatgattcttgttacagcagaattagaagagagtcctgaggactcaattcagttgggagttactagaaataaaatcatgacagctcaatatgaatgttaccaaaagattatgcaagaccccattcaacaagcagaaggcgtttactgcaacagaacctgggatggatggctctgctggaacgatgttgcagcaggaactgaatcaatgcagctctgccctgattactttcaggactttgatccatcagaaaaagttacaaagatctgtgaccaagatggaaactggtttagacatccagcaagcaacagaacatggacaaattatacccagtgtaatgttaacacccacgagaaagtgaagactgcactaaatttgttttacctgaccataattggacacggattgtctattgcatcactgcttatctcgcttggcatattcttttatttcaagagcctaagttgccaaaggattaccttacacaaaaatctgttcttctcatttgtttgtaactctgttgtaacaatcattcacctcactgcagtggccaacaaccaggccttagtagccacaaatcctgttagttgcaaagtgtcccagttcattcatctttacctgatgggctgtaattacttttggatgctctgtgaaggcatttacctacacacactcattgtggtggccgtgtttgcagagaagcaacatttaatgtggtattattttcttggctggggatttccactgattcctgcttgtatacatgccattgctagaagcttatattacaatgacaattgctggatcagttctgatacccatctcctctacattatccatggcccaatttgtgctgctttactggtgaatctttttttcttgttaaatattgtacgcgttctcatcaccaagttaaaagttacacaccaagcggaatccaatctgtacatgaaagctgtgagagctactcttatcttggtgccattgcttggcattgaatttgtgctgattccatggcgacctgaaggaaagattgcagaggaggtatatgactacatcatgcacatccttatgcacttccagggtcttttggtctctaccattttctgcttctttaatggagaggttcaagcaattctgagaagaaactggaatcaatacaaaatccaatttggaaacagcttttccaactcagaagctcttcgtagtgcgtcttacacagtgtcaacaatcagtgatggtccaggttatagtcatgactgtcctagtgaacacttaaatggaaaaagcatccatgatattgaaaatgttctcttaaaaccagaaaatttatataattgaaaatagaaggatggttgtctcactgtttggtgcttctcctaactcaaggacttggacccatgactctgtagccagaagacttcaatattaaatgactttggggaatgtcataaagaagagccttcacatgaaattagtagtgtgttgataagagtgtaacatccagctctatgtgggaaaaaagaaatcctggtttgtaatgtttgtcagtaaatactcccactatgcctgatgtgacgctactaacctgacatcaccaagtgtggaattggagaaaagcacaatcaacttttctgagctggtgtaagccagttccagcacaccattgatgaattcaaacaaatggctgtaaaactaaacatacatgttgggcatgattctacccttattcsccccaagagacctagctaaggtctataaacatgaagggaaaattagcttttagttttaaaactctttatcccatcttgattggggcagttgactttttttttttcccagagtgccgtagtcctttttgtaactaccctctcaaatggacaataccagaagtgaattatccctgctggctttcttttctctatgaaaagcaactgagtacaattgttatgatctactcatttgctgacacatcagttatatcttgtggcatatccattgtggaaactggatgaacaggatgtataatatgcaatcttacttctatatcattaggaaaacatcttagttgatgctacaaaacaccttgtcaacctcttcctgtcttaccaaacagtgggagggaattcctagctgtaaatataaattttgcccttccatttctactgtataaacaaattagcaatcattttatataaagaaaatcaatgaaggatttcttattttcttggaattttgtaaaaagaaattgtgaaaaatgagcttgtaaatactccattattttattttatagtctcaaatcaaatacatacaacctatgtaatttttaaagcaaatatataatgcaacaatgtgtgtatgttaatatctgatactgtatctgggctgattttttaaataaaatagagtctggaatgct

SEQ ID NO: 284 - protein, 620 aa, Homo sapiens
MALGEEKAEAEASEDTKAQSYGRGSCRERELDIPGPMSGEQPPRLEAEGGLISPVWGAEGIPAPTCWIGTDPGSPSRAHQPQASDANREPVAERSEPALSGLPPATMGSGDLLLSGESQVEKTKLSSSEEFPQTLSLPRTTTICSGHDADTEDDPSLADLPQALDLSQQPHSSGLSCLSQWKSVLSPGSAAQPSSCSISASSTGSSLQGHQERAEPRGGSLAKVSSSLEPVVPQEPSSVVGLGPRPQWSPQPVFSGGDASGLGRRRLSFQAEYWACVLPDSLPPSPDRHSPLWNPNKEYEDLLDYTYPLRPGPQLPKHLDSRVPADPVLQDSGVDLDSFSVSPASTLKSPTNVSPNCPPAEATALPFSGPREPSLKQWPSRVPQKQGGMGLASWSQLASTPRAPGSRDARWERREPALRGAKDRLTIGKHLDMGSPQLRTRDRGWPSPRPEREKRTSQSARRPTCTESRWKSEEEVESDDEYLALPARLTQTFCCQLEELICWLYNVADVTDHGTAARSNLTSLKSSLQLYRQFKKDIDEHQSLTESVLQKGEILLQCLLENTPVLEDVLGRIAKQSGELESHADRLYDSILASLDMLAGCTLIPDKKPMAAMEHPCEGV

SEQ ID NO: 285 - DNA, 2195 bp, Homo sapiens
tcggggccagcgcatggggctgctgagaccgctccggacgtgcgaagcgttcgcggtgcggtaggaagctgaagtcttcagcagaaccctgacctaggtagggagtctcaatggccctgggtgaagaaaaggcagaagcggaagcatctgaagacacaaaggcccagtcctatgggagagggagctgcagggagcgggagctggacatcccagggcccatgagtggggagcagcccccacgcctggaagctgagggagggctcatctcccctgtatggggggcagaagggatacctgcccctacttgctggattgggactgaccctggcagcccctctagagcccaccagccacaggccagtgatgccaacagagagcccgtagctgagaggtctgagcctgcactcagtggcctgcctcctgccaccatggggtctggagaccttctgctctccggggaaagccaggtggagaagaccaagctttcttcctccgaggagttccctcagactctgagccttcccagaacaacaactatttgctcaggacatgatgctgataccgaagatgatccatccctagcagatttgccccaggcactggacctcagccagcagcctcacagctcaggtctctcttgcctgtcacagtggaagtccgtgctgagcccaggttccgcagctcagccttccagctgcagcatctctgcttcctccacgggcagcagtctccagggtcaccaggagagggcggagcctcgtggtggttctctggccaaggtctcctcctccctggagccggtcgtcccccaggaaccttcctctgtggtggggctaggacctcggccccagtggtcaccacagcctgtgttctctgggggtgatgcttctgggctaggcaggagacgcctctccttccaggctgagtactgggcctgtgtgctgccagattccctgcctccatcacccgaccgccactcccctctctggaacccaaataaagagtatgaagatctgcttgactatacttacccactgaggcccgggcctcagctcccaaagcaccttgatagccgtgtgccagctgaccctgtcctgcaggactccggggtagacctggatagcttctctgtctctccagcaagcaccctcaaatcacctactaatgtctcccccaactgcccaccagcagaggccactgccctgccattttctgggcccagagagccaagccttaagcagtggccctccagagtaccccagaaacagggtggcatgggcttggcatcttggagccaacttgcatctacccccagagccccaggcagtagggatgctcgttgggagcgcagagagccagccctgaggggtgcgaaggaccggctgactataggcaagcaccttgatatgggctctccccagctaaggacacgggacagagggtggccctcgcccaggccagagagggagaagaggaccagccagagtgcccggcgccctacctgcacagagtctaggtggaaatcagaagaggaagtggaaagtgatgacgagtatcttgccctccccgctcggctgacacagacattttgctgtcagctggaagagctgatctgctggctgtataatgttgcagatgttactgaccacgggactgcagccaggtccaatcttacaagtctcaagtcttctctgcagctttaccggcaatttaagaaagatatagatgaacatcagtctctgacggagagtgtcttacagaagggggagattcttcttcagtgcctgttggagaacaccccagttttagaggatgtccttgggaggatcgcaaagcagtctggtgagctggagagccacgcagatcgcctgtatgactctatcttggcctctctggacatgctggctggctgcacccttatccctgacaaaaagcccatggcggcaatggagcacccatgtgaaggggtttaacctggcatcttctcaggcagaggtgcaacctgtcggccaaacactggctagtgagaaaaaaaaccttcaagaagtccttgcaagagccattcaacactgaagtcaagggggaaaccttcaatatactagctttaaaatgcctttctcctccctgaatggagggctgagttactatttttatttacaatgaatccttccaaactaaaaaaaaaaaaaaaaaaa

SEQ ID NO: 286 - DNA, 1730 bp, Homo sapiens
gagatgtttctaacatttaaataagaaaaaaatcaaatcgaagtcagcctgctggaaaagtgatcacatggcagttgcagtaacttgtatggaaagagaaaatgcaatgagcccagttactgcacttgccactaccatgctgtccatggaaggaataatcagcagttcagttgtcacaagccgcccttgaagaaaacgcagcaaaatatcttcattttaaaatattttgctgcgttttcttcaagggcggcttgtgacaacgcagcaaaatattttaaaatgaagatattgcagtccccagagccagtgaaggtttcttttggtaaaatgaaattgtgccattgtcaaagtaccccgtagtgatgagcactgactggttcactggccacattttagttcttcataataataggccacaaaagggctctgtggtttgcctccatgtgcactggcccctccccacccctagggggcactcagtagctgctgagaaggcctgtccacgaggctgttggaacccctccaataaatacttagaggtagtgtatctgatgcttgttttcatggagaaaattgtattggagaacttaaaacatcacgaatatttttaataggatccgcagacacccaaaggagaagcttggtcttttccaggtatttccaacttgagttcaacccaaagcctttgaaaggaatgcattaccacatgaccacatgctgagaccccatggggtctaacacgggacctaagaaagtctctgcagccagatagtacatggtgtctccacaaaactaggcattctggagattgcccagaaagggatgtgaggggaccgttaagatctgtcttgcttatctcatgcactcacattccttcagcctcctggagttcctgataaaaggaagccagggtgttgacattttttagctattgatttcccaatagcttgtggatcagttgtacacccacacttccttctctgcctaattccgtttttctggaaaaagtagtatgcccatgtatgtgtgtttttcttaacacaggtccatgaaagtttggcttcctggtttgatgtctgttgcgtggcctggaaaccagggagcagcaactattgagatggtttctgtgttcagtgaaaaattctatttcattgagacaattttttctttatccacagtaattttttgacactgtcatcatgaaactacccttaggaaaataagattacctgcaaaaaaaaaaagaaatgagttatggaataggaacagttatgtgatgattctgaaactttaacttagagcttcattactttaagaatggaaaacaacctctgagtttgatttcccaaagtttcataaagcccctaagctcatgattttcatcaactctttgcccacatagtcatttacctccacagccgtttgttgtcatagaaggggtggtggtgtttggatttgatttttttcaacttgcagtgagaaataggataggtgacaaaaccttacttgttttcttaagacaattcagtgcttgagcatctctgtcagaaatggaatgaaatactgttagccaattagaattattttatgtattgttattgtgttttgctgatttttatatgaaaatataattattcattcttgatctctggaagcaatcattattatgaggatcattttactttggaaacactttcataataaagataagtattaagaaaaaaaaaaaa

SEQ ID NO: 287 - DNA, 1866 bp, Homo sapiens
attcttgtgagtggattacaggtttttgatcccaaaattccagagctttcaactctctgaatttgtagtcctgaatatcccagtggtgggggttcccagcattgtgggtgctacttgcaaggccatagaatctagatggccctgtcttgaccctgaaatgaaccttaagccttagaacaaagtcatgcagatgccccatttgataataatcttattcacctgtgctctggtcctcggtttctgcatgtgttagcattgcattgataactcagaatcttgataaacacttaatatttgggcctgaagcattaaactttctttttattgtatatacttaaaaaatagaactcactgccctatcatacattgtagccctcttattctttggtctttcatatgcattagttaaatcccttaaagtagacattcataaaaacttacattgtttattggagtataaaatattacccaagtttcttcatgagttgacatgagctgttttaaatactggtgtattttcagaacagtaaaattactgaatatcagaaaaaatgttaattgatgatgaagcttattcccaaaatgccttttgtgcatatgatacttggaaagtcactaatgtgcctcagttaatacatcagtaaaatgttgtgtttcttttccagtgtagtgtttttggaatataaattccccatgctagtatagtatctcagcaaagagaatttccccccaggaggctcagtaaaggaataccgtgtcttacccatcgttatgatggaaggctgctttgaaaatggctgttttaccttataaggttaaaattttgatccatatgttaagtgatagaagattttggtgcaacagtagtaggatatatttctcctagaacatcccttattggcttacatgattttattgccttttaatagatattttgtcattttggccaaacaaaagacactgagtagttacacttaagttaaaaatgaggggaaaatcattattttaggtgtggagccatttttattataaaactttctcaaaataaaaaaacattgaatcatttcaatttttgcagtccctgtattagtatatgaatacatacttgccatttgaattaataacatgaaaagagtatactgtgtttttaaatccgtgtttctttgaatttaaagggtgtacaggtctttctgtagggaaaattattccatgtaaacatttcaactctgtatgaaaatgttaaatattgtaagaaagttatcctctcattttttcactgctatgatatatttattataaaatagggaatgaatgaatgaatatggattgctgttaactagaaacacttctgtatgtcagtcagcatttaatgaccacctactgtgtgcacagcactactggtaaaattttgaagacattgttaacattaaaaaatattttaaagttgtctacaaatctgagccttgtaatgatgtatatttaagttatttttgtttttatagattaaagtaagattaaaatatactatccagttttattactaaaaaagactggttttaattttaccaatgtgtgaactataaaagctttttgcctacagattttacattttaaaattatctatggctgttttaaattgtctagcaatttatatggttgtggttaactcatttaagaaacaattatctttctatattaagccattttcaaatagcaagacagtgcttgtctttttttgttattacactaactgcaattcagtaagctgcatgacaaaatatgtattatgtaaataaactgggtttactaaaaaaaaaaaaaaaaaaaaaaaaaaaaaaaaaaaaaaaaaaaaaaaaaaaaaaaaaa

SEQ ID NO: 288 - protein, 720 aa, Homo sapiens
MNNHVSSKPSTMKLKHTINPILLYFIHFLISLYTILTYIPFYFFSESRQEKSNRIKAKPVNSKPDSAYRSVNSLDGLASVLYPGCDTLDKVFTYAKNKFKNKRLLGTREVLNEEDEVQPNGKIFKKVILGQYNWLSYEDVFVRAFNFGNGLQMLGQKPKTNIAIFCETRAEWMIAAQACFMYNFQLVTLYATLGGPAIVHALNETEVTNIITSKELLQTKLKDIVSLVPRLRHIITVDGKPPTWSDFPKGIIVHTMAAVEALGAKASMENQPHSKPLPSDIAVIMYTSGSTGLPKGVMISHSNIIAGITGMAERIPELGEEDVYIGYLPLAHVLELSAELVCLSHGCRIGYSSPQTLADQSSKIKKGSKGDTSMLKPTLMAAVPEIMDRIYKNVMNKVSEMSSFQRNLFILAYNYKMEQISKGRNTPLCDSFVFRKVRSLLGGNIRLLLCGGAPLSATTQRFMNICFCCPVGQGYGLTESAGAGTISEVWDYNTGRVGAPLVCCEIKLKNWEEGGYFNTDKPHPRGEILIGGQSVTMGYYKNEAKTKADFSEDENGQRWLCTGDIGEFEPDGCLKIIDRKKDLVKLQAGEYVSLGKVEAALKNLPLVDNICAYANSYHSYVIGFVVPNQKELTELARKKGLKGTWEELCNSCEMENEVLKVLSEAAISASLEKFEIPVKIRLSPEPWTPETGLVTDAFKLKRKELKTHYQADIERMYGRK

SEQ ID NO: 289 - DNA, 3741 bp, Homo sapiens
gaattcgttgttgggaaggactggggaaacagctgtaacatttgccaccctcagaagctgctggtcctgtgtcacaccaccttagcctcttgatcgaggaagattctcgctgaagtctgttaattctactttttgagtacttatgaataaccacgtgtcttcaaaaccatctaccatgaagctaaaacataccatcaaccctattcttttatattttatacattttctaatatcactttatactattttaacatacattccgttttattttttctccgagtcaagacaagaaaaatcaaaccgaattaaagcaaagcctgtaaattcaaaacctgattctgcatacagatctgttaatagtttggatggtttggcttcagtattataccctggatgtgatactttagataaagtttttacatatgcaaaaaacaaatttaagaacaaaagactcttgggaacacgtgaagttttaaatgaggaagatgaagtacaaccaaatggaaaaatttttaaaaaggttattcttggacagtataattggctttcctatgaagatgtctttgttcgagcctttaattttggaaatggattacagatgttgggtcagaaaccaaagaccaacatcgccatcttctgtgagaccagggccgagtggatgatagctgcacaggcgtgttttatgtataattttcagcttgttacattatatgccactctaggaggtccagccattgttcatgcattaaatgaaacagaggtgaccaacatcattactagtaaagaactcttacaaacaaagttgaaggatatagtttctttggtcccacgcctgcggcacatcatcactgttgatggaaagccaccgacctggtccgacttccccaagggcatcattgtgcataccatggctgcagtggaggccctgggagccaaggccagcatggaaaaccaacctcatagcaaaccattgccctcagatattgcagtaatcatgtacacaagtggatccacaggacttccaaagggagtcatgatctcacatagtaacattattgctggtataactgggatggcagaaaggattccagaactaggagaggaagatgtctacattggatatttgcctctggcccatgttctagaattaagtgctgagcttgtctgtctttctcacggatgccgcattggttactcttcaccacagactttagcagatcagtcttcaaaaattaaaaaaggaagcaaaggggatacatccatgttgaaaccaacactgatggcagcagttccggaaatcatggatcggatctacaaaaatgtcatgaataaagtcagtgaaatgagtagttttcaacgtaatctgtttattctggcctataattacaaaatggaacagatttcaaaaggacgtaatactccactgtgcgacagctttgttttccggaaagttcgaagcttgctagggggaaatattcgtctcctgttgtgtggtggcgctccactttctgcaaccacgcagcgattcatgaacatctgtttctgctgtcctgttggtcagggatacgggctcactgaatctgctggggctggaacaatttccgaagtgtgggactacaatactggcagagtgggagcaccattagtttgctgtgaaatcaaattaaaaaactgggaggaaggtggatactttaatactgataagccacaccccaggggtgaaattcttattgggggccaaagtgtgacaatggggtactacaaaaatgaagcaaaaacaaaagctgatttctctgaagatgaaaatggacaaaggtggctctgtactggggatattggagagtttgaacccgatggatgcttaaagattattgatcgtaaaaaggaccttgtaaaactacaggcaggggaatatgtttctcttgggaaagtagaggcagctttgaagaatcttccactagtagataacatttgtgcatatgcaaacagttatcattcttatgtcattggatttgttgtgccaaatcaaaaggaactaactgaactagctcgaaagaaaggacttaaagggacttgggaggagctgtgtaacagttgtgaaatggaaaatgaggtacttaaagtgctttccgaagctgctatttcagcaagtctggaaaagtttgaaattccagtaaaaattcgtttgagtcctgaaccgtggacccctgaaactggtctggtgacagatgccttcaagctgaaacgcaaagagcttaaaacacattaccaggcggacattgagcgaatgtatggaagaaaataattattctcttctggcatcagtttgctacagtgagctcacatcaaataggaaaatacttgaaatgcatgtctcaagctgcaaggcaaactccattcctcatattaaactattacttctcatgacgtcaccatttttaactgacaggattagtaaaacattaagacagcaaacttgtgtctgtctcttctttcattttccccgccaccaacttactttaccacctatgactgtacttgtcagtatgagaatttttctgaatcatattggggaagcagtgattttaaaacctcaagtttttaaacatgatttatatgttctgtataatgttcagtttgtaactttttaaaagtttggatgtatagagggataaataggaaatataagaattggttatttgggggcttttttacttactgtatttaaaaatacaagggtattgatatgaaattatgtaaatttcaaatgcttatgaatcaaatcattgttgaacaaaagatttgttgctgtgtaattattgtcttgtatgcatttgagagaaataaatatacccatacttatgttttaagaagttgagatcttgtgaatatatgcctgtcagtgtcttctttatatatttattttttattagaaaaaatgaagtttggttggtgatgcatgaaacaaaatagcaagagagggttatagtttaatagtaagggagataacacagcatgtgtagcaccagttgataattggtctctagtagcttactgtcaaaatgttcaatgaagtcttctgttcatctgttgaaactaggaaaatacccaaacttaaatggaagaattctgaaagagaggatagaatttaaagaacaagagtatataaagttattctttgaatatttcgttgactatatgtacattgagttatctatatttgtaaacaaattagtcatggaaaattattctattccaaagtctccttttagtctagataatcattatttcattttaaaattagtgtttttcatagtttgcactgatgcgtgtatggatgtgtgtgagtcagtggtagcttatttaaaaagcaccttatcctttctcccataacctttgtacactaaaaaatgaaagaatttagaatgtatttgatgatagcattctcactaagacacatgagaatttaactttataaccgcgtgagttaagatttaattcataggttttgatgtcattgttgaagttatttgtaattcagaaaccttgcttgtgtgatacatagtaagtctcttcatttattactgcttgcctgttgttatatctggattatcaaaagcaatagtgcaccaattaagatgtgctcaaatcaggacttaaatcataggcaccacatttttcatgtcagactagttactttgttgattctcagttactgtaggcatcaaaaggcaaaaatca

SEQ ID NO: 290 - protein, 198 aa, Homo sapiens
MTLRCLEPSGNGGEGTRSQWGTAGSAEEPSPQAARLAKALRELGQTGWYWGSMTVNEAKEKLKEAPEGTFLIRDSSHSDYLLTISVKTSAGPTNLRIEYQDGKFRLDSIICVKSKLKQFDSVVHLIDYYVQMCKDKRTGPEAPRNGTVHLYLTKPLYTSAPSLQHLCRLTINKCTGAIWGLPLPTRLKDYLEEYKFQV

SEQ ID NO: 291 - DNA, 1947 bp, Homo sapiens
ggcttactcactatagggctcgagcggccgcccgggcaggtctagaattcagcggccgctgaattctagcggaggcggcggcggcggccgcggccgaggtcgaggcgatcagtgggtgaccgcggctgcgagggactttgtcatccgtcctccaggatctggggagaaagagccccatcccttctctctctgccaccatttcggacaccccgcagggactcgttttgggattcgcactgacttcaaggaaggacgcgaacccttctctgaccccagctcgggcggccacctgtctttgccgcggtgacccttctctcatgaccctgcggtgccttgagccctccgggaatggcggggaagggacgcggagccagtgggggaccgcggggtcggcggaggagccatccccgcaggcggcgcgtctggcgaaggccctgcgggagctcggtcagacaggatggtactggggaagtatgactgttaatgaagccaaagagaaattaaaagaggcaccagaaggaactttcttgattagagatagctcgcattcagactacctactaacaatatctgttaaaacatcagctggaccaactaatcttcgaatcgaataccaagacggaaaattcagattggactctatcatatgtgtcaaatccaagcttaaacaatttgacagtgtggttcatctgatcgactactatgttcagatgtgcaaggataagcggacaggtccagaagccccccggaacggcactgttcacctttatctgaccaaaccgctctacacgtcagcaccatctctgcagcatctctgtaggctcaccattaacaaatgtaccggtgccatctggggactgcctttaccaacaagactaaaagattacttggaagaatataaattccaggtataaatgtttctctttttttaaacatgtctcacatagagtatctccgaatgcagctatgtaaaagagaaccaaaacttgagtgctctggataactatatggaatgctttctaagaacagctgaagctaatctaatttaaatttaacagcttgaagaggtagctaggtgtttaaagttcctccagatacttttacctgagtgatgcttcccttcctaaggctgaccaagacctgttgatccttttagattaaaaataaaatgtcgcatgtaaaggctgaagtcgcgttttatcagaatgccttgccttcttaggttcttttccattatgtcaaaggtccaggctccagtaggagagaaagaactcctcataggaatactgaagaagtgggaaggaaccaagctgacacaggcctcactgcaatttgatatgcctgctgatcagagtctcttgggcattttatattttgcattctgatgtacctaggagttttgttaaacagatgatgtatgtgagtatttatcccattttatgcaattaaccaaatcaaccaaaaaaagtgaccatgaagtcctgtatttgtctttttactacatgtaggaactctcatgtgaatgagtactgtagtaatccattctatgggagccttatttcagaaatatttcaaactggtgcaaatggaaaagactttctcttttcctttaaagctaaagacaagaatatcatgctatacaggtgcaactcaatccccgttaataaaaaccaatgtaggtataggcattctaccctttcaaatagctgtgtcccaacctgttgccattgattttttggaaatggctttagaaatatccaagttgtccttgaattgtctaaccatggacataaacagttgtctcccttctactgtgtagaatactttgacttaattttcttccagatacagggggatacctgcctgtttttcaaagtgtttatttactgctgttactatttgattagaatgtattaaataaaaaaaacctgatttctaaaaaaaaaa

SEQ ID NO: 292 - DNA, 259 bp, Homo sapiens
  misc_feature (217)..(217): n = a, c, g, or t
agacagccgatttttacgacccagcaagaggccgagctggtacaatatcctgactgtaaatcgtccagtggtaatattggcgaggacccagaccacttaaatcagagctcgtctccttctcaaatgtttccgtggatgagaccacaagctcctggtagacgaagaggaagacaaacctacagtcgcttccaaactctagagttggaaaaggaatttntttttaacccctatctgaccagggaaagaagaatcgaggttt

SEQ ID NO: 293 - protein, 391 aa, Homo sapiens
MDQCVTVERELEKVLHKFSGYGQLCERGLEELIDYTGGLKHEILQSHGQDAELSGTLSLVLTQCCKRIKDTVQKLASDHKDIHSSVSRVGKAIDKNFDSDISSVGIDGCWQADSQRLLNEVMVEHFFRQGMLDVAEELCQESGLSVDPSQKEPFVELNRILEALKVRVLRPALEWAVSNREMLIAQNSSLEFKLHRLYFISLLMGGTTNQREALQYAKNFQPFALNHQKDIQVLMGSLVYLRQGIENSPYVHLLDANQWADICDIFTRDACALLGLSVESPLSVSFSAGCVALPALINIKAVIEQRQCTGVWNQKDELPIEVDLGKKCWYHSIFACPILRQQTTDNNPPMKLVCGHIISRDALNKMFNGSKLKCPYCPMEQSPGDAKQIFF

SEQ ID NO: 294 - DNA, 3239 bp, Homo sapiens
gcttggggaacgaggagcaggacgcggcctcggtggggcccgggccgaacggctgcggacacctgggcgccgaggagccgagcgccgccgtctccggcatggatcagtgcgtgacggtggagcgcgagctggagaaggtgctgcacaagttctcaggctacgggcagctgtgcgagcgcggcctggaggagctcatcgactacaccggcggcctcaagcacgagatcctgcagagccacggccaagatgctgaattatcagggacactttcacttgttttgacacagtgctgtaaaagaataaaggatactgttcaaaaattggcctccgaccacaaagacatccacagcagtgtttctcgggttggaaaagccattgataagaattttgattctgacattagcagtgtgggaatagatggctgctggcaggcagacagccaaaggcttctcaatgaagtgatggtggagcacttctttcgacaaggaatgctggatgtggctgaggagctctgtcaggaatctggtctttctgtagacccaagtcagaaggaaccatttgtggagttaaatagaatattagaggcattaaaggtcagagttctgagacctgctctggagtgggcagtgtcaaaccgggaaatgcttatagctcaaaacagctccttggaatttaagctacacagactgtattttattagcttgttaatgggtggaaccacaaatcagcgagaggcattacaatatgctaaaaattttcagccatttgccctaaatcatcaaaaagacattcaggttttgatgggaagccttgtgtacctgagacaagggattgagaactcaccatatgttcacctacttgatgcaaaccagtgggctgatatctgtgacatctttacacgggatgcttgtgccctcctggggctctccgtggagtcccctctcagtgtcagtttctcagcaggttgtgtggcgctgccagctttaattaacatcaaagccgtgattgaacagaggcagtgtactggagtttggaaccagaaagatgaattacctattgaagtggaccttggtaaaaagtgctggtatcactctatatttgcctgccccattcttcgtcagcaaacaacagataacaatccacccatgaaattggtctgtggtcatattatatcaagagatgccctgaataaaatgtttaatggtagcaaattaaaatgtccctactgtccaatggaacaaagtccaggagatgccaaacagatatttttctgaagagataactttagtttgcaatttgtaagtgaaactgaatcgtgggtgcatttcagaagagaacgttccatataatgcagctaaccaaggactcctgtgtttctataagctaatgctccagaaactttgccaacctgttagtgtacacacactgaggggagtgctcccggtgaatattatcatagggctttattatattcttggtcttcatttctgatcaagtaaatacaccagcagttgtcattcaatgcaggtttttgtacttaattatatggtgatttttttactttttaagagcagaaacggaaattgacctccccgccatgtgtttaatattcctcctgcttttacttttgtcattttcttgataatcgtaagccttgagagtgtttgtgaaaaagttttatttcctgttatgtatacataattaaatgaaaattcttcagaaaaagtttgataaattgaattgtggttatgaaactaatttgcatttttatttgcttaagaaagaaagctgtgatagattccagatatgctttttgatgttttcctctgctccagctccaagaagtcagcacacctgcattttagctctgcatgcagccccagcaggctgcgtgtttaagaatttcattgtttaactggctggtgtgagaagtcttccgttagcatagagtggaaggagtactattgtttggttgggtttttgtttgtttgttttttgtttttgcttttattgccaagaggtgcttgttttaaaagtatgtttaataaaatgaaattctaaagttagaagtgttcttaagttgatatttactctcttggtcttggtagccctattatatcattgcagacacagtgttgtgcatgtgtgtattgtatatgtgcaccagcatcaaacattgtgtatctggaaggaaagcagcatgttccagttctaaaatgcagttaccagacccatcactttaaatccttaaagttagaagctagcaaattttctgtagtgcagaacgtttattgctgtttttgtgtttgaatagtataatgtttgatgcctctcttctgcaaagcgtatcatctcattgactgtgaatctgtatattattctgatggatacagataatgatcttttctcttgtgaggtatcttcatttatgcactgtccaaaaatagccatgtgtaagagtctttctgtatgacgaactacatggaaaagacttctgtggacataattctgaccgaaacccatgaagttacttcagtataagaagaacgttacacggaaatcaccaaatattttgcaactttatttcttctgacatggagtgaacatcaataggaatactttcaaagaaaatgaaaacacagaagcaaagagaaatgtggcacttcacattttaaactacagatggacttggtttgagggagggggaatcacagatttggtgctaagttaattagaaactggcagcgttttacagtagtacaccagcctggatgttttttctaaaatgtttacctgggagagctggggtttgtttgtgaggagaaagagtactgtggaaaacctctgcttgagtaccatgtggccaggcctatgtggatggctactccgtgctgtgcggcttcaccagcggttgggattggcccagcttggagtgcttgtgtggtccaacctcagtctggccccatagtgacttttgccccatgattctgcttcactgttggaatcctctttgaagttccccctctctttgctaaagcagtgaaggaagagaacagagacaaactctttggactgtgaaagagaaggtagagaattccaggcaacagtctgaccaagggtgtaaaccagtttattatatatatatttttcctttgaattaaaacctatgagtgactacaaaaaggattagactgagccgaataaaaaaaaaaaaaaaaaaaaaaaaaaaaaaaaaaaaa

SEQ ID NO: 295 - DNA, 2905 bp, Homo sapiens
gcataaaaacaaaaacctcactggcagcaagctgccgaataacaacagagtctagaggacatatttgtgggctgcacagatattttaggaatttcagaaattagaacaggagccaaaatgatttacattggcgttggcactgattcctttaaatggtctgggaaagggggttgggaagaggatggagctcaactggccagaagaggagcagctgcagtcctgatagcttctctagcctcggtcttttgagtgataagtagtcatgttgttttcatccagttggtttcttgtcattcccaagaagaatctcccaggccacatctttggggataactgacatactggattagccttttcaaaagaaaagtcatcctatttggttttatggggtgtgagttttgtgtgtacacacacagaaacatgtaaggtggtttgggtcatgtttttaaccacctggcaatacagtccactttctggtttcttttattgtgggaagtaaatggtcaagctgctcaggcagtgaaaagatgtggagaatgtccgttgtcattcttgccactgtattccatttgctaccgagatataacattaaggtggacacattttctaactgtattaattaaaagtcaatggatacagagagtggattttctccccaagtcccatccctgctgaagaccgcttggatgaactccccaacccactgtgcccctcccgcaacactaccagtagactttagaaccatagttaactaagtcttttacctctgagatacttaattctgggaaaattggtgacaattttcaacttctaaataggtaactcgactgcaaaataatcaaaactgataacaatgaaactgcggctcttaaacaaagccatgcatgccgtgcatttgtattgaaatgtctccatgatatgaagccaaatattcaatgtaacatacttaatatccaaaggtggaaacaaaagaatgtagagatccagtgttaagagttccatttgcttcaattaattatttaccttcctgtggaataatatatatatatatatttaatagaaccatagatagactagtagaatttagattataaatgtgtgagtgcagattatcctgctattgcacaagctagaggggggaaaaatctcaattccagctggcaagatgctagccaggacacatataagaaagttgcactagattgaatggtcacagaatcggaggacatggaagaaaaaggaaacttcggtggttctgcagcagacatgggctaggtcatatgtggtttctatgagttcgtgtctcaaaaaaaaaaggagggggggcatctgtccccggtggagctcacctatttggaatatggggcatttgttttttccactgcaatgatttcagtctggtttcatcatgttggaattcgatcacaccattttcaaacaatgttaacatagtccagcttttgtttttctcatctcttctgagaggagactcactgtttctgtctgaggaagctcataccctcggcaaaacatcaggacaaataaagagaaatgggggtacgcattcccaacagaagcagtgtgttatttgttttaaaactctgaacagagatcttggaaatctttcaaaaagaccattgaattcttcattggctgagaacgacgttttaaaatgtcttaaataaggctttgtttgcattgtttgagttcaaggggccttattattgaatggaattgcacaagcctttctttgtgcaatcaaaccattgttattggtagttctgtaaaggaaactgtggaatcgaattggcagtggagtcataaatctatttactgagtgtggcttccaagaaatgttgcaattcaaaatgcactaagtctgtgatttattggagatttggagattctaaataatatttttaaaaaacttccatgcaacttctggtttaatgtttggcaactccacatgataaaaaaataaaaacagcccaaccgagtttcggaattaagtattcttctagtaagtgattcaaacttgtaatatttgccacaggactgacttatttatttactagctagaagctcttaagttcacttgtttatcagggcatatacagaagggtttgttaaaactcgatgttaactttacaactttctgacctggtgcatgaattctcaagtactgtatttcactgtgttggtgtgtctgatggaaatttcgaggtggtcccacaaaaatattttatgtagtgtgccttcaaagagaaccatttatttctcttcacttatcgtcccacaaagtcacatttggtggtggtcagccaagtcgcatctggtctagttttactcttgtcccaattttaaagagaaatgggaatgagtttgccctggtgagacccataccattgcaatgattatcttgagcacttaaagtccagtgttggctgttagtgtatttgatattctgcctgtctcctcatggttgaaatatgtctgaagaatagcagcataatctcttggctgtttatacttttttaaactttcctgtgttgtaaatattgtatacttttggtgattccagctatgtaacctctatgctctgtaaggtgattatttgtatatagcaacatggcccagtgatattatatagtttcccaatggagaggttattgagtaacctttgcattagtttaaacactaccagaagaatgctgagccaactataaacactcaattttgtatgttttccaaattgtacttattactgcttttgatactgtattacgtgccaatagtttcccaatcacatagcaggcaagagatattttgtactttttgatccactgtaatatttaataaaaaatgttactatctgtttcaaaaaaaaaaaaaaaaagggcggccg

SEQ ID NO: 296 - protein, 179 aa, Homo sapiens
MASQNRDPAATSVAAARKGAEPSGGAARGPVGKRLQQELMTLMMSGDKGISAFPESDNLFKWVGTIHGAAGTVYEDLRYKLSLEFPSGYPYNAPTVKFLTPCYHPNVDTQGNICLDILKEKWSALYDVRTILLSIQSLLGEPNIDSPLNTHAAELWKNPTAFKKYLQETYSKQVTSQEP

SEQ ID NO: 297 - DNA, 783 bp, Homo sapiens
ggcacgagcgagttcctgtctctctgccaacgccgcccggatggcttcccaaaaccgcgacccagccgccactagcgtcgccgccgcccgtaaaggagctgagccgagcgggggcgccgcccggggtccggtgggcaaaaggctacagcaggagctgatgaccctcatgatgtctggcgataaagggatttctgccttccctgaatcagacaaccttttcaaatgggtagggaccatccatggagcagctggaacagtatatgaagacctgaggtataagctctcgctagagttccccagtggctacccttacaatgcgcccacagtgaagttcctcacgccctgctatcaccccaacgtggacacccagggtaacatatgcctggacatcctgaaggaaaagtggtctgccctgtatgatgtcaggaccattctgctctccatccagagccttctaggagaacccaacattgatagtcccttgaacacacatgctgccgagctctggaaaaaccccacagcttttaagaagtacctgcaagaaacctactcaaagcaggtcaccagccaggagccctgacccaggctgcccagcctgtccttgtgtcgtctttttaatttttccttagatggtctgtcctttttgtgatttctgtataggactctttatcttgagctgtggtatttttgttttgtttttgtcttttaaattaagcctcggttgagcccttgtatattaaataaatgcatttttgtccttttttaaaaaaaaaaaaaaaaaaa

SEQ ID NO: 298 - protein, 212 aa, Homo sapiens
MKPPSSIQTSEFDSSDEEPIEDEQTPIHISWLSLSRVNCSQFLGLCALPGCKFKDVRRNVQKDTEELKSCGIQDIFVFCTRGELSKYRVPNLLDLYQQCGIITHHHPIADGGTPDIASCCEIMEELTTCLKNYRKTLIHCYGGLGRSCLVAACLLLYLSDTISPEQAIDSLRDLRGSGAIQTIKQYNYLHEFRDKLAAHLSSRDSQSRSVSR

SEQ ID NO: 299 - DNA, 836 bp, Homo sapiens
ccggtgagtcgccggcgctgcagagggaggcggcactggtctcgacgtggggcggccagcgatgaagccgcccagttcaatacaaacaagtgagtttgactcatcagatgaagagcctattgaagatgaacagactccaattcatatatcatggctatctttgtcacgagtgaattgttctcagtttctcggtttatgtgctcttccaggttgtaaatttaaagatgttagaagaaatgtccaaaaagatacagaagaactaaagagctgtggtatacaagacatatttgttttctgcaccagaggggaactgtcaaaatatagagtcccaaaccttctggatctctaccagcaatgtggaattatcacccatcatcatccaatcgcagatggagggactcctgacatagccagctgctgtgaaataatggaagagcttacaacctgccttaaaaattaccgaaaaaccttaatacactgctatggaggacttgggagatcttgtcttgtagctgcttgtctcctactatacctgtctgacacaatatcaccagagcaagccatagacagcctgcgagacctaagaggatccggggcaatacagaccatcaagcaatacaattatcttcatgagtttcgggacaaattagctgcacatctatcatcaagagattcacaatcaagatctgtatcaagataaaggaattcaaatagcatatatatgaccatgtctgaaatgtcagttctctagcataatttgtattgaaatgaaaccaccagtgttatcaacttgaatgtaaatgtacatgtgcagatattcctaaagttttattgac

SEQ ID NO: 300 - protein, 847 aa, Homo sapiens [sequence omitted]

SEQ ID NO: 301 - DNA, 449 bp, Homo sapiens
tttattcctgtcattttccctcatgaaatgtgtttgatgtgcttggctgatgttcattataaagctcactgcgcactgggactctgggctgtatatgcatatgttgtttacagaatccaaaggcctggaacacaatggtactcaaaaacatagctgcctcggggaaattctccagtgaccgaacaattaaagaatatgcccaaaacatctggaacgtggaaccttcagatctaaagatttctctatccaatgaatctaacaaagtcaatggaaattgaactctacaatgtctctagaaaacatagcttcttactgaacttgaacatttttacaacattcactggtttttgttttgttagctaataatctataatagttgagtatctctgggaatggggagggaaattatatgtaatagagcttaaaaataaagtgtcaatttccaagga

SEQ ID NO: 302 - protein, 496 aa, Homo sapiens
MWQIVFFTLSCDLVLAAAYNNFRKSMDSIGKKQYQVQHGSCSYTFLLPEMDNCRSSSSPYVSNAVQRDAPLEYDDSVQRLQVLENIMENNTQWLMKLENYIQDNMKKEMVEIQQNAVQNQTAVMIEIGTNLLNQTAEQTRKLTDVEAQVLNQTTRLELQLLEHSLSTNKLEKQILDQTSEINKLQDKNSFLEKKVLAMEDKHIIQLQSIKEEKDQLQVLVSKQNSIIEELEKKIVTATVNNSVLQKQQHDLMETVNNLLTMMSTSNSAKDPTVAKEEQISFRDCAEVFKSGHTTNGIYTLTFPNSTEEIKAYCDMEAGGGGWTIIQRREDGSVDFQRTWKEYKVGFGNPSGEYWLGNEFVSQLTNQQRYVLKIHLKDWEGNEAYSLYEHFYLSSEELNYRIHLKGLTGTAGKISSISQPGNDFSTKDGDNDKCICKCSQMLTGGWWFDACGPSNLNGMYYPQRQNTNKFNGIKWYYWKGSGYSLKATTMMIRPADF

SEQ ID NO: 303 - DNA, 2269 bp, Homo sapiens
tgggttggtgtttatctcctcccagccttgagggagggaacaacactgtaggatctggggagagaggaacaaaggaccgtgaaagctgctctgtaaaagctgacacagccctcccaagtgagcaggactgttcttcccactgcaatctgacagtttactgcatgcctggagagaacacagcagtaaaaaccaggtttgctactggaaaaagaggaaagagaagactttcattgacggacccagccatggcagcgtagcagccctgcgtttcagacggcagcagctcgggactctggacgtgtgtttgccctcaagtttgctaagctgctggtttattactgaagaaagaatgtggcagattgttttctttactctgagctgtgatcttgtcttggccgcagcctataacaactttcggaagagcatggacagcataggaaagaagcaatatcaggtccagcatgggtcctgcagctacactttcctcctgccagagatggacaactgccgctcttcctccagcccctacgtgtccaatgctgtgcagagggacgcgccgctcgaatacgatgactcggtgcagaggctgcaagtgctggagaacatcatggaaaacaacactcagtggctaatgaagcttgagaattatatccaggacaacatgaagaaagaaatggtagagatacagcagaatgcagtacagaaccagacggctgtgatgatagaaatagggacaaacctgttgaaccaaacagctgagcaaacgcggaagttaactgatgtggaagcccaagtattaaatcagaccacgagacttgaacttcagctcttggaacactccctctcgacaaacaaattggaaaaacagattttggaccagaccagtgaaataaacaaattgcaagataagaacagtttcctagaaaagaaggtgctagctatggaagacaagcacatcatccaactacagtcaataaaagaagagaaagatcagctacaggtgttagtatccaagcaaaattccatcattgaagaactagaaaaaaaaatagtgactgccacggtgaataattcagttcttcaaaagcagcaacatgatctcatggagacagttaataacttactgactatgatgtccacatcaaactcagctaaggaccccactgttgctaaagaagaacaaatcagcttcagagactgtgctgaagtattcaaatcaggacacaccacaaatggcatctacacgttaacattccctaattctacagaagagatcaaggcctactgtgacatggaagctggaggaggcgggtggacaattattcagcgacgtgaggatggcagcgttgattttcagaggacttggaaagaatataaagtgggatttggtaacccttcaggagaatattggctgggaaatgagtttgtttcgcaactgactaatcagcaacgctatgtgcttaaaatacaccttaaagactgggaagggaatgaggcttactcattgtatgaacatttctatctctcaagtgaagaactcaattataggattcaccttaaaggacttacagggacagccggcaaaataagcagcatcagccaaccaggaaatgattttagcacaaaggatggagacaacgacaaatgtatttgcaaatgttcacaaatgctaacaggaggctggtggtttgatgcatgtggtccttccaacttgaacggaatgtactatccacagaggcagaacacaaataagttcaacggcattaaatggtactactggaaaggctcaggctattcgctcaaggccacaaccatgatgatccgaccagcagatttctaaacatcccagtccacctgaggaactgtctcgaactattttcaaagacttaagcccagtgcactgaaagtcacggctgcgcactgtgtcctcttccaccacagagggcgtgtgctcggtgctgacgggacccacatgctccagattagagcctgtaaactttatcacttaaacttgcatcacttaacggaccaaagcaagaccctaaacatccataattgtgattagacagaacacctatgcaaagatgaacccgaggctgagaatcagactgacagtttacagacgctgctgtcacaaccaagaatgttatgtgcaagtttatcagtaaataactggaaaacagaacacttatgttatacaatacagatcatcttggaactgcattcttctgagcactgtttatacactgtgtaaatacccatatgtcct

SEQ ID NO: 304 - protein, 763 aa, Homo sapiens
MKASPRRPLILKRRRLPLPVQNAPSETSEEEPKRSPAQQESNQAEASKEVAESNSCKFPAGIKIINHPTMPNTQVVAIPNNANIHSIITALTAKGKESGSSGPNKFILISCGGAPTQPPGLRPQTQTSYDAKRTEVTLETLGPKPAARDVNLPRPPGALCEQKRETCADGEAAGCTINNSLSNIQWLRKMSSDGLGSRSIKQEMEEKENCHLEQRQVKVEEPSRPSASWQNSVSERPPYSYMAMIQFAINSTERKRMTLKDIYTWIEDHFPYFKHIAKPGWKNSIRHNLSLHDMFVRETSANGKVSFWTIHPSANRYLTLDQVFKPLDPGSPQLPEHLESQQKRPNPELRRNMTIKTELPLGARRKMKPLLPRVSSYLVPIQFPVNQSLVLQPSVKVPLPLAASLMSSELARHSKRVRIAPKVLLAEEGIAPLSSAGPGKEEKLLFGEGFSPLLPVQTIKEEEIQPGEEMPHLARPIKVESPPLEEWPSPAPSFKEESSHSWEDSSQSPTPRPKKSYSGLRSPTRCVSEMLVIQHRERRERSRSRRKQHLLPPCVDEPELLFSEGPSTSRWAAELPFPADSSDPASQLSYSQEVGGPFKTPIKETLPISSTPSKSVLPRTPESWRLTPPAKVGGLDFSPVQTSQGASDPLPDPLGLMDLSTTPLQSAPPLESPQRLLSSEPLDLISVPFGNSSPSDIDVPKPGSPEPQVSGLAANRSLTEGLVLDTMNDSLSKILLDISFPGLDEDPLGPDNINWSQFIPELQ

SEQ ID NO: 305 - DNA, 3336 bp, Homo sapiens
  misc_feature (3317)..(3317): n = a, c, g, or t
cggcggcgactgcagtctggagggtccacacttgtgattctcaatggagagtgaaaacgcagattcataatgaaagctagcccccgtcggccactgattctcaaaagacggaggctgccccttcctgttcaaaatgccccaagtgaaacatcagaggaggaacctaagagatcccctgcccaacaggagtctaatcaagcagaggcctccaaggaagtggcggagtccaactcttgcaagtttccagctgggatcaagattattaaccaccccaccatgcccaacacgcaagtagtggccatccccaacaatgctaatattcacagcatcatcacagcactgactgccaagggaaaagagagtggcagtagtgggcccaacaaattcatcctcatcagctgtgggggagccccaactcagcctccaggactccggcctcaaacccaaaccagctatgatgccaaaaggacagaagtgaccctggagaccttgggaccaaaacctgcagctagggatgtgaatcttcctagaccacctggagccctttgcgagcagaaacgggagacctgtgcagatggtgaggcagcaggctgcactatcaacaatagcctatccaacatccagtggcttcgaaagatgagttctgatggactgggctcccgcagcatcaagcaagagatggaggaaaaggagaattgtcacctggagcagcgacaggttaaggttgaggagccttcgagaccatcagcgtcctggcagaactctgtgtctgagcggccaccctactcttacatggccatgatacaattcgccatcaacagcactgagaggaagcgcatgactttgaaagacatctatacgtggattgaggaccactttccctactttaagcacattgccaagccaggctggaagaactccatccgccacaacctttccctgcacgacatgtttgtccgggagacgtctgccaatggcaaggtctccttctggaccattcaccccagtgccaaccgctacttgacattggaccaggtgtttaagccactggacccagggtctccacaattgcccgagcacttggaatcacagcagaaacgaccgaatccagagctccgccggaacatgaccatcaaaaccgaactccccctgggcgcacggcggaagatgaagccactgctaccacgggtcagctcatacctggtacctatccagttcccggtgaaccagtcactggtgttgcagccctcggtgaaggtgccattgcccctggcggcttccctcatgagctcagagcttgcccgccatagcaagcgagtccgcattgcccccaaggtgctgctagctgaggaggggatagctcctctttcttctgcaggaccagggaaagaggagaaactcctgtttggagaagggttttctcctttgcttccagttcagactatcaaggaggaagaaatccagcctggggaggaaatgccacacttagcgagacccatcaaagtggagagccctcccttggaagagtggccctccccggccccatctttcaaagaggaatcatctcactcctgggaggattcgtcccaatctcccaccccaagacccaagaagtcctacagtgggcttaggtccccaacccggtgtgtctcggaaatgcttgtgattcaacacagggagaggagggagaggagccggtctcggaggaaacagcatctactgcctccctgtgtggatgagccggagctgctcttctcagaggggcccagtacttcccgctgggccgcagagctcccgttcccagcagactcctctgaccctgcctcccagctcagctactcccaggaagtgggaggaccttttaagacacccattaaggaaacgctgcccatctcctccaccccgagcaaatctgtcctccccagaacccctgaatcctggaggctcacgcccccagccaaagtagggggactggatttcagcccagtacaaacctcccagggtgcctctgaccccttgcctgaccccctggggctgatggatctcagcaccactcccttgcaaagtgctcccccccttgaatcaccgcaaaggctcctcagttcagaacccttagacctcatctccgtcccctttggcaactcttctccctcagatatagacgtccccaagccaggctccccggagccacaggtttctggccttgcagccaatcgttctctgacagaaggcctggtcctggacacaatgaatgacagcctcagcaagatcctgctggacatcagctttcctggcctggacgaggacccactgggccctgacaacatcaactggtcccagtttattcctgagctacagtagagccctgcccttgcccctgtgctcaagctgtccaccatcccgggcactccaaggctcagtgcaccccaagcctctgagtgaggacagcaggcagggactgttctgctcctcatagctccctgctgcctgattatgcaaaagtagcagtcacaccctagccactgctgggaccttgtgttccccaagagtatctgattcctctgctgtccctgccaggagctgaagggtgggaacaacaaaggcaatggtgaaaagagattaggaaccccccagcctgtttccattctctgcccagcagtctcttaccttccctgatctttgcagggtggtccgtgtaaatagtataaattctccaaattatcctctaattataaatgtaagcttatttccttagatcattatccagagactgccagaaggtgggtaggatgacctggggtttcaattgacttctgttccttgcttttagttttgatagaagggaagacctgcagtgcacggtttcttccaggctgaggtacctggatcttgggttcttcactgcagggacccagacaagtggatctgcttgccagagtcctttttgcccctccctgccacctccccgtgtttccaagtcagctttcctgcaagaagaaatcctggttaaaaaagtcttttgtattgggtcaggagttgaatttggggtgggaggatggatgcaactgaagcagagtgtgggtgcccagatgtgcgctattagatgtttctctgataatgtccccaatcataccagggagactggcattgacgagaactcaggtggaggcttgagaaggccgaaagggcccctgacctgcctggcttccttagcttgcccctcagctttgcaaagagccaccctaggccccagctgaccgcatgggtgtgagccagcttgagaacactaactactcaataaaagcgaaggtggaccnaaaaaaaaaaaaaaaaaaa

SEQ ID NO: 306 - protein, 148 aa, Homo sapiens
MARMNRPAPVEVSYKHMRFLITHNPTNATLSTFIEDLKKYGATTVVRVCEVTYDKTPLEKDGITVVDWPFDDGAPPPGKVVEDWLSLVKAKFCEAPGSCVAVHCVAGLGRKRRGAINSKQLTYLEKYRPKQRLRFKDPHTHKTRCCVM

SEQ ID NO: 307 - DNA, 1321 bp, Homo sapiens
tgactatccagctctgagagacgggagtttggagttgcccgctttactttggttgggttggggggggcggcgggctgttttgttccttttcttttttaagagttgggttttcttttttaattatccaaacagtgggcagcttcctcccccacacccaagtatttgcacaatatttgtgcggggtatgggggtgggtttttaaatctcgtttctcttggacaagcacagggatctcgttctcctcattttttgggggtgtgtggggacttctcaggtcgtgtccccagccttctctgcagtcccttctgccctgccgggcccgtcgggaggcgccatggctcggatgaaccgcccggccccggtggaggtgagctacaaacacatgcgcttcctcatcacccacaaccccaccaacgccacgctcagcaccttcattgaggacctgaagaagtacggggctaccactgtggtgcgtgtgtgtgaagtgacctatgacaaaacgccgctggagaaggatggcatcaccgttgtggactggccgtttgacgatggggcgcccccgcccggcaaggtagtggaagactggctgagcctggtgaaggccaagttctgtgaggcccccggcagctgcgtggctgtgcactgcgtggcgggcctgggccggaagcgccgcggagccatcaacagcaagcagctcacctacctggagaaataccggcccaaacagaggctgcggttcaaagacccacacacgcacaagacccggtgctgcgttatgtagctcaggaccttggctgggcctggtcgtcatgtaggtcaggaccttggctggacctggaggccctgcccagccctgctctgcccagcccagcaggggctccaggccttggctggccccacatcgccttttcctccccgacacctccgtgcacttgtgtccgaggagcgaggagcccctcgggccctgggtggcctctgggccctttctcctgtctccgccactccctctggcggcgctggccgtggctctgtctctctgaggtgggtcgggcgccctctgcccgccccctcccacaccagccaggctggtctcctctagcctgtttgttgtggggtgggggtatattttgtaaccactgggcccccagcccctcttttgcgaccccttgtcctgacctgttctcggcaccttaaattattagaccccggggcagtcaggtgctccggacacccgaaggcaataaaacaggagccgtgaaaaaaaaaaaaaaaaaaaaaaaaaaaaaaaaaaaaaaaaaaaaaaaaaaaaaaaaaaaaaaaa

SEQ ID NO: 308 - protein, 194 aa, Homo sapiens
MAIRELKVCLLGDTGVGKSSIVCRFVQDHFDHNISPTIGASFMTKTVPCGNELHKFLIWDTAGQERFHSLAPMYYRGSAAAVIVYDITKQDSFYTLKKWVKELKEHGPENIVMAIAGNKCDLSDIREVPLKDAKEYAESIGAIVVETSAKNAINIEELFQGISRQIPPLDPHENGNNGTIKVEKPTMQASRRCC

SEQ ID NO: 309 - DNA, 921 bp, Homo sapiens
ccctcggacggccccggaggatgctgctgagccccggcactgcctggctgcgagcacatgatggcgatacgggagctcaaagtgtgccttctcggggacactggggttgggaaatcaagcatcgtgtgtcgatttgtccaggatcactttgaccacaacatcagccctactattggggcatcttttatgaccaaaactgtgccttgtggaaatgaacttcacaagttcctcatctgggacactgctggtcaggaacggtttcattcattggctcccatgtactatcgaggctcagctgcagctgttatcgtgtatgatattaccaagcaggattcattttataccttgaagaaatgggtcaaggagctgaaagaacatggtccagaaaacattgtaatggccatcgctggaaacaagtgcgacctctcagatattagggaggttcccctgaaggatgctaaggaatacgctgaatccataggtgccatcgtggttgagacaagtgcaaaaaatgctattaatatcgaagagctctttcaaggaatcagccgccagatcccacccttggacccccatgaaaatggaaacaatggaacaatcaaagttgagaagccaaccatgcaagccagccgccggtgctgttgacccaagggcgtggtccacggtacttgaagaagccagagcccacatcctgtgcactgctgaaggaccctacgctcggtggcctggcacctcactttgagaagagtgagcacactggctttgcatcctggaaggcctgcagggggcggggcaggaaatgtacctgaaaaggattttagaaaaccctgggaaacccaccacaccaccacaaaatggcctttagtgtatgaaatgcacatggaggggatgtagttgcatttttgctaaaaaaaaaaaaaa

SEQ ID NO: 310 - protein, 2215 aa, Homo sapiens
MVILQQGDHVWMDLRLGQEFDVPIGAVVKLCDSGQVQVVDDEDNEHWISPQNATHIKPMHPTSVHGVEDMIRLGDLNEAGILRNLLIRYRDHLIYTYTGSILVAVNPYQLLSIYSPEHIRQYTNKKIGEMPPHIFAIADNCYFNMKRNSRDQCCIISGESGAGKTESTKLILQFLAAISGQHSWIEQQVLEATPILEAFGNAKTIRNDNSSRFGKYIDIHFNKRGAIEGAKIEQYLLEKSRVCRQALDERNYHVFYCMLEGMSEDQKKKLGLGQASDYNYLAMGNCITCEGRVDSQEYANIRSAMKVLMFTDTENWEISKLLAAILHLGNLQYEARTFENLDACEVLFSPSLATAASLLEVNPPDLMSCLTSRTLITRGETVSTPLSREQALDVRDAFVKGIYGRLFVWIVDKINAAIYKPPSQDVKNSRRSIGLLDIFGFENFAVNSFEQLCINFANEHLQQFFVRHVFKLEQEEYDLESIDWLHIEFTDNQDALDMIANKPMNIISLIDEESKFPKGTDTTMLHKLNSQHKLNANYIPPKNNHETQFGINHFAGIVYYETQGFLEKNRDTLHGDIIQLVHSSRNKFIKQIFQADVAMGAETRKRSPTLSSQFKRSLELLMRTLGACQPFFVRCIKPNEFKKPMLFDRHLCVRQLRYSGMMETIRIRRAGYPIRYSFVEFVERYRVLLPGVKPAYKQGDLRGTCQRMAEAVLGTHDDWQIGKTKIFLKDHHDMLLEVERDKAITDRVILLQKVIRGFKDRSNFLKLKNAATLIQRHWRGHNCRKNYGLMRLGFLRLQALHRSRKLHQQYRLARQRIIQFQARCRAYLVRKAFRHRLWAVLTVQAYARGMIARRLHQRLRAEYLWRLEAEKMRLAEEEKLRKEMSAKKAKEEAERKHQERLAQLAREDAERELKEKEAARRKKELLEQMERARHEPVNHSDMVDKMFGFLGTSGGLPGQEGQAPSGFEDLERGRREMVEEDLDAALPLPDEDEEDLSEYKFAKFAATYFQGTTTHSYTRRPLKQPLLYHDDEGDQLAALAVWITILRFMGDLPEPKYHTAMSDGSEKIPVMTKIYETLGKKTYKRELQALQGEGEAQLPEGQKKSSVRHKLVHLTLKKKSKLTEEVTKRLHDGESTVQGNSMLEDRPTSNLEKLHFIIGNGILRPALRDEIYCQISKQLTHNPSKSSYARGWILVSLCVGCFAPSEKFVKYLRNFIHGGPPGYAPYCEERLRRTFVNGTRTQPPSWLELQATKSKKPIMLPVTFMDGTTKTLLTDSATTAKELCNALADKISLKDRFGFSLYIALFDKVSSLGSGSDHVMDAISQCEQYAKEQGAQERNAPWRLFFRKEVFTPWHSPSEDNVATNLIYQQVVRGVKFGEYRCEKEDDLAELASQQYFVDYGSEMILERLLNLVPTYIPDREITPLKTLEKWAQLAIAAHKKGIYAQRRTDAQKVKEDVVSYARFKWPLLFSRFYEAYKFSGPSLPKNDVIVAVNWTGVYFVDEQEQVLLELSFPEIMAVSSSRECRVWLSLGCSDLGCAAPHSGWAGLTPAGPCSPCWSCRGAKTTAPSFTLATIKGDEYTFTSSNAEDIRDLVVTFLEGLRKRSKYVVALQDNPNPAGEESGFLSFAKGDLIILDHDTGEQVMNSGWANGINERTKQRGDFPTDCVYVMPTVTMPPREIVALVTMTPDQRQDVVRLLQLRTAEPEVRAKPYTLEEFSYDYFRPPPKHTLSRVMVSKARGKDRLWSHTREPLKQALLKKLLGSEELSQEACLAFIAVLKYMGDYPSKRTRSVNELTDQIFEGPLKAEPLKDEAYVQILKQLTDNHIRYSEERGWELLWLCTGLFPPSNILLPHVQRFLQSRKHCPLAIDCLQRLQKALRNGSRKYPPHLVEVEAIQHKTTQIFHKVYFPDDTDEAFEVESSTKAKDFCQNIATRLLLKSSEGFSLFVKIADKVISVPENDFFFDFVRHLTDWIKKARPIKDGIVPSLTYQVFFMKKLWTTTVPGKDPMADSIFHYYQELPKYLRGYHKCTREEVLQLGALIYRVKFEEDKSYFPSIPKLLRELVPQDLIRQVSPDDWKRSIVAYFNKHAGKSKEEAKLAFLKLIFKWPTFGSAFFEVKQTTEPNFPEILLIAINKYGVSLIDPKTKDILTTHPFTKISNWSSGNTYFHITIGNLVRGSKLLCETSLGYKMDDLLTSYISQMLTAMSKQRGSRSGK

SEQ ID NO: 311 - DNA, 7465 bp, Homo sapiens
gctctgggcaggagagagagtgagagacaagagacacacacagagagacggcgaggaagggaaagacccagagggacgcctagaacgagacttggagccagacagaggaagaggggacgtgtgtttgcagactggctgggcccgtgacccagcttcctgagtcctccgtgcaggtggcagctgtaccaggctggcaggtcactgagagtgggcagctgggccccagaactgtgcctggcccagtgggcagcaggagctcctgacttgggaccatggtgattcttcagcagggggaccatgtgtggatggacctgagattggggcaggagttcgacgtgcccatcggggcggtggtgaagctctgcgactctgggcaggtccaggtggtggatgatgaagacaatgaacactggatctctccgcagaacgcaacgcacatcaagcctatgcaccccacgtcggtccacggcgtggaggacatgatccgcctgggggacctcaacgaggcgggcatcttgcgcaacctgcttatccgctaccgggaccacctcatctacacgtatacgggctccatcctggtggctgtgaacccctaccagctgctctccatctactcgccagagcacatccgccagtataccaacaagaagattggggagatgcccccccacatctttgccattgctgacaactgctacttcaacatgaaacgcaacagccgagaccagtgctgcatcatcagtggggaatctggggccgggaagacggagagcacaaagctgatcctgcagttcctggcagccatcagtgggcagcactcgtggattgagcagcaggtcttggaggccacccccattctggaagcatttgggaatgccaagaccatccgcaatgacaactcaagccgtttcggaaagtacatcgacatccacttcaacaagcggggcgccatcgagggcgcgaagattgagcagtacctgctggaaaagtcacgtgtctgtcgccaggccctggatgaaaggaactaccacgtgttctactgcatgctggagggtatgagtgaggatcagaagaagaagctgggcttgggccaggcctctgactacaactacttggccatgggtaactgcataacctgtgagggccgggtggacagccaggagtacgccaacatccgctccgccatgaaggtgctcatgttcactgacaccgagaactgggagatctcgaagctcctggctgccatcctgcacctgggcaacctgcagtatgaggcacgcacatttgaaaacctggatgcctgtgaggttctcttctccccatcgctggccacagctgcatccctgcttgaggtgaaccccccagacctgatgagctgcctgactagccgcaccctcatcacccgcggggagacggtgtccaccccactgagcagggaacaggcactggacgtgcgcgacgccttcgtaaaggggatctacgggcggctgttcgtgtggattgtggacaagatcaacgcagcaatttacaagcctccctcccaggatgtgaagaactctcgcaggtccatcggcctcctggacatctttgggtttgagaactttgctgtgaacagctttgagcagctctgcatcaacttcgccaatgagcacctgcagcagttctttgtgcggcacgtgttcaagctggagcaggaggaatatgacctggagagcattgactggctgcacatcgagttcactgacaaccaggatgccctggacatgattgccaacaagcccatgaacatcatctccctcatcgatgaggagagcaagttccccaagggcacagacaccaccatgttacacaagctgaactcccagcacaagctcaacgccaactacatcccccccaagaacaaccatgagacccagtttggcatcaaccattttgcaggcatcgtctactatgagacccaaggcttcctggagaagaaccgagacaccctgcatggggacattatccagctggtccactcctccaggaacaagttcatcaagcagatcttccaggccgatgtcgccatgggcgccgagaccaggaagcgctcgcccacacttagcagccagttcaagcggtcactggagctgctgatgcgcacgctgggtgcctgccagcccttctttgtgcgatgcatcaagcccaatgagttcaagaagcccatgctgttcgaccggcacctgtgcgtgcgccagctgcggtactcaggaatgatggagaccatccgaatccgccgagctggctaccccatccgctacagcttcgtagagtttgtggagcggtaccgtgtgctgctgccaggtgtgaagccggcctacaagcagggcgacctccgcgggacttgccagcgcatggctgaggctgtgctgggcacccacgatgactggcagataggcaaaaccaagatctttctgaaggaccaccatgacatgctgctggaagtggagcgggacaaagccatcaccgacagagtcatcctccttcagaaagtcatccggggattcaaagacaggtctaactttctgaagctgaagaacgctgccacactgatccagaggcactggcggggtcacaactgtaggaagaactacgggctgatgcgtctgggcttcctgcggctgcaggccctgcaccgctcccggaagctgcaccagcagtaccgcctggcccgccagcgcatcatccagttccaggcccgctgccgcgcctatctggtgcgcaaggccttccgccaccgcctctgggctgtgctcaccgtgcaggcctatgcccggggcatgatcgcccgcaggctgcaccaacgcctcagggctgagtatctgtggcgcctcgaggctgagaaaatgcggctggcggaggaagagaagcttcggaaggagatgagcgccaagaaggccaaggaggaggccgagcgcaagcatcaggagcgcctggcccagctggctcgtgaggacgctgagcgggagctgaaggagaaggaggccgctcggcggaagaaggagctcctggagcagatggaaagggcccgccatgagcctgtcaatcactcagacatggtggacaagatgtttggcttcctggggacttcaggtggcctgccaggccaggagggccaggcacctagtggctttgaggacctggagcgagggcggagggagatggtggaggaggacctggatgcagccctgcccctgcctgacgaggatgaggaggacctctctgagtataaatttgccaagttcgcggccacctacttccaggggacaaccacgcactcctacacccggcggccactcaaacagccactgctctaccatgacgacgagggtgaccagctggcagccctggcggtctggatcaccatcctccgcttcatgggggacctccctgagcccaagtaccacacagccatgagtgatggcagtgagaagatccctgtgatgaccaagatttatgagaccctgggcaagaagacgtacaagagggagctgcaggccctgcagggcgagggcgaggcccagctccccgagggccagaagaagagcagtgtgaggcacaagctggtgcatttgactctgaaaaagaagtccaagctcacagaggaggtgaccaagaggctgcatgacggggagtccacagtgcagggcaacagcatgctggaggaccggcccacctccaacctggagaagctgcacttcatcatcggcaatggcatcctgcggccagcactccgggacgagatctactgccagatcagcaagcagctgacccacaacccctccaagagcagctatgcccggggctggattctcgtgtctctctgcgtgggctgtttcgccccctccgagaagtttgtcaagtacctgcggaacttcatccacgggggcccgcccggctacgccccgtactgtgaggagcgcctgagaaggacctttgtcaatgggacacggacacagccgcccagctggctggagctgcaggccaccaagtccaagaagccaatcatgttgcccgtgacattcatggatgggaccaccaagaccctgctgacggactcggcaaccacggccaaggagctctgcaacgcgctggccgacaagatctctctcaaggaccggttcgggttctccctctacattgccctgtttgacaaggtgtcctccctgggcagcggcagtgaccacgtcatggacgccatctcccagtgcgagcagtacgccaaggagcagggcgcccaggagcgcaacgccccctggaggctcttcttccgcaaagaggtcttcacgccctggcacagcccctccgaggacaacgtggccaccaacctcatctaccagcaggtggtgcgaggagtcaagtttggggagtacaggtgtgagaaggaggacgacctggctgagctggcctcccagcagtactttgtagactatggctctgagatgatcctggagcgcctcctgaacctcgtgcccacctacatccccgaccgcgagatcacgcccctgaagacgctggagaagtgggcccagctggccatcgccgcccacaagaaggggatttatgcccagaggagaactgatgcccagaaggtcaaagaggatgtggtcagttatgcccgcttcaagtggcccttgctcttctccaggttttatgaagcctacaaattctcaggccccagtctccccaagaacgacgtcatcgtggccgtcaactggacgggtgtgtactttgtggatgagcaggagcaggtacttctggagctgtccttcccagagatcatggccgtgtccagcagcagggagtgccgtgtctggctctcactgggctgctctgatcttggctgtgctgcgcctcactcaggctgggcaggactgaccccggcggggccctgttctccgtgttggtcctgcaggggagcgaaaacgacggcccccagcttcacgctggccaccatcaagggggacgaatacaccttcacctccagtaatgctgaggacattcgtgacctggtggtcaccttcctagaggggctccggaagagatctaagtatgttgtggccctgcaggataaccccaaccccgcaggcgaggagtcaggcttcctcagctttgccaagggagacctcatcatcctggaccatgacacgggcgagcaggtcatgaactcgggctgggccaacggcatcaatgagaggaccaagcagcgtggggacttccccaccgactgtgtgtacgtcatgcccactgtcaccatgccaccgcgggagattgtggccctggtcaccatgactcccgatcagaggcaggacgttgtccggctcttgcagctgcgaacggcggagcccgaggtgcgtgccaagccctacacgctggaggagttttcctatgactacttcaggcccccacccaagcacacgctgagccgtgtcatggtgtccaaggcccgaggcaaggaccggctgtggagccacacgcgggaaccgctcaagcaggcgctgctcaagaagctcctgggcagtgaggagctctcgcaggaggcctgcctggccttcattgctgtgctcaagtacatgggcgactacccgtccaagaggacacgctccgtcaacgagctcaccgaccagatctttgagggtcccctgaaagccgagcccctgaaggacgaggcatatgtgcagatcctgaagcagctgaccgacaaccacatcaggtacagcgaggagcggggttgggagctgctctggctgtgcacgggccttttcccacccagcaacatcctcctgccccacgtgcagcgcttcctgcagtcccgaaagcactgcccactcgccatcgactgcctgcaacggctccagaaagccctgagaaacgggtcccggaagtaccctccgcacctggtggaggtggaggccatccagcacaagaccacccagattttccacaaggtctacttccctgatgacactgacgaggccttcgaagtggagtccagcaccaaggccaaggacttctgccagaacatcgccaccaggctgctcctcaagtcctcagagggattcagcctctttgtcaaaattgcagacaaggtcatcagcgttcctgagaatgacttcttctttgactttgttcgacacttgacagactggataaagaaagctcggcccatcaaggacggaattgtgccctcactcacctaccaggtgttcttcatgaagaagctgtggaccaccacggtgccagggaaggatcccatggccgattccatcttccactattaccaggagttgcccaagtatctccgaggctaccacaagtgcacgcgggaggaggtgctgcagctgggggcgctgatctacagggtcaagttcgaggaggacaagtcctacttccccagcatccccaagctgctgcgggagctggtgccccaggaccttatccggcaggtctcacctgatgactggaagcggtccatcgtcgcctacttcaacaagcacgcagggaagtccaaggaggaggccaagctggccttcctgaagctcatcttcaagtggcccacctttggctcagccttcttcgaggtgaagcaaactacggagccaaacttccctgagatcctcctaattgccatcaacaagtatggggtcagcctcatcgatcccaaaacgaaggatatcctcaccactcatcccttcaccaagatctccaactggagcagcggcaacacctacttccacatcaccattgggaacttggtgcgcgggagcaaactgctctgcgagacgtcactgggctacaagatggatgacctcctgacttcctacattagccagatgctcacagccatgagcaaacagcggggctccaggagcggcaagtgaacagtcacggggaggtgctggttccatgcctgctctcgaggcagcagtgggttcaggcccatcagctacccctgcagctggggaagacttatgccatcccggcagcgaggctgggctggccagccaccactgactataccaactgggcctctgatgttcttccagtgaggcatctctctgggatgcagaacttccctccatccacccctctggcacctgggttggtctaatcctagtttgctgtggccttcccggttgtgagagcctgtgatccttagatgtgtctcctgtttcagaccagccccaccatgcaacttcctttgactttctgtgtaccactgggatagaggaatcaagaggacaatctagctctccatactttgaacaaccaaatgtgcattgaatactctgaaaccgaagggactggatctgcaggtgggatgagggagacagaccacttttctatattgcagtgtgaatgctgggcccctgctcaagtctaccctgatcacctcagggcataaagcatgtttcattctctgaaa

SEQ ID NO: 312 - protein, 694 aa, Homo sapiens [sequence omitted]

SEQ ID NO: 313 - DNA, 2467 bp, Homo sapiens
acctctggtggtggctggctactcggatacgaattcggcacgagggcaggcgtcggctagtgtcgggagtcgcgcccgccgcccctcagctgcccggcccggagcccgagacgcgcgcaccatgagcggtggtgaagtggtctgctccggatggctccgcaagtcccccccggagaaaaagttgaagcgttatgcatggaagaggagatggttcgtgttacgcagtggccgtttaactggagatccagatgttttggaatattacaaaaatgatcatgccaagaagcctattcgtattattgatttaaatttatgtcaacaagtagatgctggattgacatttaacaaaaaagagtttgaaaacagctacatttttgatatcaacactattgaccggattttctacttggtagcagacagcgaggaggagatgaataagtgggttcgttgtatttgtgacatctgtgggtttaatccaacagaagaagatcctgtgaagccacctggcagctctttacaagcaccagctgatttacctttagctataaatacagcaccaccatccacccaggcagattcatcctctgctactctacctcctccatatcagctaatcaatgttccaccacacctggaaactcttggcattcaggaggatcctcaagactacctgttgctcatcaactgtcaaagcaagaagcccgaacccaccagaacgcatgctgattctggaaaatccacctcttctgaaacagactccaatgataacgtcccttctcataaaaatcctgcttcctcccagagcaaacatggaatgaatggcttttttcagcagcaaatgatatacgactctccaccttcacgtgccccatctgcttcagttgactccagcctttataacctgcccaggagttattcccatgatgttttaccaaaggtgtctccatcaagtactgaagcagatggagaactctatgtttttaataccccatctgggacatcgagtgtagagactcaaatgaggcatgtatctattagttatgacattcctccaacacctggtaatacttatcagattccacgaacatttccagaaggaaccttgggacagacatcaaagctagacactattccagatattcctccacctcggccaccgaaaccacatccagctcatgaccgatctcctgtggaaacgtgtagtatcccacgcaccgcctcagacactgacagtagttactgtatccctacagcagggatgtcgccttcacgtagtaataccatttccactgtggatttaaacaaattgcgaaaagatgctagttctcaagactgctatgatattccacgagcatttccaagtgatagatctagttcacttgaaggcttccataaccactttaaagtcaaaaatgtgttgacagtgggaagtgtttcaagtgaagaactggatgaaaattacgtcccaatgaatcccaattcaccaccacgacaacattccagcagttttacagaaccaattcaggaagcaaattatgtgccaatgactccaggaacatttgatttttcctcatttggaatgcaagttcctcctcctgctcatatgggcttcaggtccagcccaaaaacccctcccagaaggccagttcctgttgcagactgtgaaccaccccccgtggataggaacctcaagccagacagaaaagtcaagccagcgcctttagaaataaaacctttgccagaatgggaagaattacaagccccagttagatctcccatcactaggagttttgctcgagactcttccaggtttcccatgtccccccgaccagattcagtgcatagcacaacttcaagcagtgactcacacgacagtgaagagaattatgttcccatgaacccaaacctgtccagtgaagacccaaatctctttggcagtaacagtcttgatggaggaagcagccctatgatcaagcccaaaggagacaaacaggtggaatacttagatctcgacttagattctgggaaatccacaccaccacgtaagcaaaagagcagtggctcaggcagcagtgtagcagatgagagagtggattatgttgttgttgaccaacagaagaccttggctctaaagagtacccgggaagcctggacagatgggagacagtccacagaatcagaaacgccagcgaagagtgtgaaatgaaaatattgccttgccatttctgaacaaaagaaaactgaattgtaaagataaatcccttttgaagaatgacttgacacttccactctaggtagatcctcaaatgagtagagttgaagtcaaaggacctttctgacataatcaagcaatttagacttaagtggtgctttgtggtatctgaacaattcataacatgtaaataatgtgggaaaatagtattgtttagctcccagagaaacatttgttccacagttaacacactcg

SEQ ID NO: 314 - protein, 586 aa, Homo sapiens
MATATPVPPRMGSRAGGPTTPLSPTRLSRLQEKEELRELNDRLAVYIDKVRSLETENSALQLQVTEREEVRGRELTGLKALYETELADARRALDDTARERAKLQIELGKCKAEHDQLLLNYAKKESDLNGAQIKLREYEAALNSKDAALATALGDKKSLEGDLEDLKDQIAQLEASLAAAKKQLADETLLKVDLENRCQSLTEDLEFRKSMYEEEINETRRKHETRLVEVDSGRQIEYEYKLAQALHEMREQHDAQVRLYKEELEQTYHAKLENARLSSEMNTSTVNSAREELMESRMRIESLSSQLSNLQKESRACLERIQELEDLLAKEKDNSRRMLTDKEREMAEIRDQMQQQLNDYEQLLDVKLALDMEISAYRKLLEGEEERLKLSPSPSSRVTVSRASSSRSVRTTRGKRKRVDVEESEASSSVSISHSASATGNVCIEEIDVDGKFIRLKNTSEQDQPMGGWEMIRKIGDTSVSYKYTSRYVLKAGQTVTIWAANAGVTASPPTDLIWKNQNSWGTGEDVKVILKNSQGEEVAQRSTVFKTTIPEEEEEEEEAAGVVVEEELFHQQGTPRASNRSCAIM

SEQ ID NO: 315 - DNA, 958 bp, Homo sapiens
aaaagaaaaggttagaaagatgagagatgataaagggtccatttgaggttaggtaatatggtttggtatccctgtagttaaaagtttttgtcttattttagaatactgtgatctatttctttagtattaatttttccttctgttttcctcatctagggaaccccaagagcatccaatagaagctgtgcaattatgtaaaattttcaactgtcttcctcaaaataaagaagtatggtaatctttacctgtatacagtgcagagccttctcagaagcacagaatatttttatatttcctttatgtgaatttttaagctgcaaatctgatggccttaatttcctttttgacactgaaagttttgtaaaagaaatcatgtccatacactttgttgcaagatgtgaattattgacactgaacttaataactgtgtactgttcggaaggggttcctcaaattttttgactttttttgtatgtgtgttttttctttttttttaagttcttatgaggaggggagggtaaataaaccactgtgcgtcttggtgtaatttgaagattgccccatctagactagcaatctcttcattattctctgctatatataaaacggtgctgtgagggaggggaaaagcatttttcaatatattgaacttttgtactgaatttttttgtaataagcaatcaaggttataattttttttaaaatagaaattttgtaagaaggcaatattaacctaatcaccatgtaagcactctggatgatggattccacaaaacttggttttatggttacttcttctcttagattcttaattcatgaggagggtgggggagggaggtggagggagggaagggtttctctattaaaatgcattcgttgtgttttttaagatagtgtaacttgcttaaatttcttatgtgacattaacaaataaaaaagctcttttaatattagataa

SEQ ID NO: 316 - protein, 821 aa, Homo sapiens
MDLAAAAEPGAGSQHLEVRDEVAEKCQKLFLDFLEEFQSSDGEIKYLQLAEELIRPERNTLVVSFVDLEQFNQQLSTTIQEEFYRVYPYLCRALKTFVKDRKEIPLAKDFYVAFQDLPTRHKIRELTSSRIGLLTRISGQVVRTHPVHPELVSGTFLCLDCQTVIRDVEQQFKYTQPNICRNPVCANRRRFLLDTNKSRFVDFQKVRIQETQAELPRGSIPRSLEVILRAEAVESAQAGDKCDFTGTLIVVPDVSKLSTPGARAETNSRVSGVDGYETEGIRGLRALGVRDLSYRLVFLACCVAPTNPRFGGKELRDEEQTAESIKNQMTVKEWEKVFEMSQDKNLYHNLCTSLFPTIHGNDEVKRGVLLMLFGGVPKTTGEGTSLRGDINVCIVGDPSTAKSQFLKHVEEFSPRAVYTSGKASSAAGLTAAVVRDEESHEFVIEAGALMLADNGVCCIDEFDKMDVRDQVAIHEAMEQQTISITKAGVKATLNARTSILAAANPISGHYDRSKSLKQNINLSAPIMSRFDLFFILVDECNEVTDYAIARRIVDLHSRIEESIDRVYSLDDIRRYLLFARQFKPKISKESEDFIVEQYKHLRQRDGSGVTKSSWRITVRQLESMIRLSEAMARMHCCDEVQPKHVKEAFRLLNKSIIRVETPDVNLDQEEEIQMEVDEGAGGINGHADSPAPVNGINGYNEDINQESAPKASLRLGFSEYCRISNLIVLHLRKVEEEEDESALKRSELVNWYLKEIESEIDSEEELINKKRIIEKVIHRLTHYDHVLIELTQAGLKGSTEGSESYEEDPYLVVNPNYLLED

SEQ ID NO: 317 - DNA, 3744 bp, Homo sapiens
ccacgcgtccggtggcggtcgagcgtggcgtaggcgaatcctcggcactaagcatatggacctcgcggcggcagcggagccgggcgccggcagccagcacctggaggtccgcgacgaggtggccgagaagtgccagaaactgttcctggacttcttggaggagtttcagagcagcgatggagaaattaaatacttgcaattagcagaggaactgattcgtcctgagagaaacacattggttgtgagttttgtggacctggaacaatttaaccagcaactttccaccaccattcaagaggagttctatagagtttacccttacctgtgtcgggccttgaaaacattcgtcaaagaccgtaaagagatccctcttgccaaggatttttatgttgcattccaagacctgcctaccagacacaagattcgagagctcacctcatccagaattggtttgctcactcgcatcagtgggcaggtggtgcggactcacccagttcacccagagcttgtgagcggaacttttctgtgcttggactgtcagacagtgatcagggatgtagaacagcagttcaaatacacacagccaaacatctgccgaaatccagtttgtgccaacaggaggagattcttactggatacaaataaatcaagatttgttgattttcaaaaggttcgtattcaagagacccaagctgagcttcctcgagggagtatcccccgcagtttagaagtaattttaagggctgaagctgtggaatcagctcaagctggtgacaagtgtgactttacagggacactgattgttgtgcctgacgtctccaagcttagcacaccaggagcacgtgcagaaactaattcccgtgtcagtggtgttgatggatatgagacagaaggcattcgaggactccgggcccttggtgttagggacctttcttataggctggtctttcttgcctgctgtgttgcgccaaccaacccaaggtttggggggaaagagctcagagatgaggaacagacagctgagagcattaagaaccaaatgactgtgaaagaatgggagaaagtgtttgagatgagtcaagataaaaatctataccacaatctttgtaccagcctgttccctactatacatggcaatgatgaagtaaaacggggtgtcctgctgatgctctttggtggcgttccaaagacaacaggagaagggacctctcttcgaggggacataaatgtttgcattgttggtgacccaagtacagctaagagccaatttctcaagcacgtggaggagttcagccccagagctgtctacaccagtggtaaagcgtccagtgctgctggcttaacagcagctgttgtgagagatgaagaatctcatgagtttgtcattgaggctggagctttgatgttggctgataatggtgtgtgttgtattgatgaatttgataagatggacgtgcgggatcaagttgctattcatgaagctatggaacagcagaccatatccatcactaaagcaggagtgaaggctactctgaacgcccggacgtccattttggcagcagcaaacccaatcagtggacactatgacagatcaaaatcattgaaacagaatataaatttgtcagctcccatcatgtcccgattcgatctcttctttatccttgtggatgaatgtaatgaggttacagattatgccattgccaggcgcatagtagatttgcattcaagaattgaggaatcaattgatcgtgtctattccctcgatgatatcagaagatatcttctctttgcaagacagtttaaacccaagatttccaaagagtcagaggacttcattgtggagcaatataaacatctccgccagagagatggttctggagtgaccaagtcttcatggaggattacagtgcgacagcttgagagcatgattcgtctctctgaagctatggctcggatgcactgctgtgatgaggtccaacctaaacatgtgaaggaagctttccggttactgaataaatcaatcatccgtgtggaaacacctgatgtcaatctagatcaagaggaagagatccagatggaggtagatgagggtgccggtggcatcaatggtcatgctgacagccctgctcctgtgaacgggatcaatggctacaatgaagacataaatcaagagtctgctcccaaagcctccttaaggctgggcttctctgagtactgccgaatctctaaccttattgtgcttcacctcagaaaggtggaagaagaagaggacgagtcagcattaaagaggagcgagcttgttaactggtacttgaaggaaatcgaatcagagatagactctgaagaagaacttataaataaaaaaagaatcatagagaaagttattcatcgactcacacactatgatcatgttctaattgagctcacccaggctggattgaaaggctccacagagggaagtgagagctatgaagaagatccctacttggtagttaaccctaactacttgctcgaagattgagatagtgaaagtaactgaccagagctgaggaactgtggcacagcacctcgtggcctggagcctggctggagctctgctagggacagaagtgtttctggaagtgatgcttccaggatttgttttcagaaacaagaattgagttgatggtcctatgtgtcacattcatcacaggtttcataccaacacaggcttcagcacttcctttggtgtgtttcctgtcccagtgaagttggaaccaaataatgtgtagtctctataaccaatacctttgttttcatgtgtaagaaaaggcccattacttttaaggtatgtgctgtcctattgagcaaataactttttttcaattgccagctactgcttttattcatcaaaataaaataacttgttctgaagttgtctattggatttctttctactgtaccctgattattacttccatctacttctgaatgtgagactttccctttttgcttaacctggagtgaagaggtagaactgtggtattatggatgaggtttctatgagaaggagtcattagagaactcatatgaaagctagaggccttagagatgactttccaaggttaattccagttttttttttttttaagtttataaaagtttattatacttttttaaaattactctttagtaatttattttacttctgtgtcctaagggtaatttctcaggattgttttcaaattgcttttttaggggaaataggtcatttgctatattacaagcaatccccaaattttatggtcttccaggaaaagttattaccgtttatgatactaacagttcctgagacttagctatgatcagtatgttcatgaggtggagcagttcctgtgttgcagcttttaacaacagatggcattcattaaatcacaaagtatgttaaaggtcacaaaagcaaaataactgtctgaggctaaggcccacgtgggacagtctaatacccatgagtactcaacttgccttgatgtctgagctttccagtgcaatgtgaatttgagcagccagaaatctattagtagaaagcaagacagattaatataggttaaaacaatgatttaaatatgtttctcccaataattatctctttccctggaatcaacttgtatgaaaccttgtcaaaatgtactccacaagtatgtacaattaagtattttaaaaataaatggcaaacattaaaaaaaaaaaaaaaaaaaaaaaaaa

SEQ ID NO: 318 - DNA, 1452 bp, Homo sapiens
ttggtttctgctgggtgtaggtccttggctggtcgggctccggtgttctgcttctccccgctgagctgctgcctggtgaagaggaagccatggcgctccgagtcaccaggaactcgaaaattaatgctgaaaataaggcgaagatcaacatggcaggcgcaaagcgcgttcctacggcccctgctgcaacctccaagcccggactgaggccaagaacagctcttggggacattggtaacaaagtcagtgaacaactgcaggccaaaatgcctatgaagaaggaagcaaaaccttcagctactggaaaagtcattgataaaaaactaccaaaacctcttgaaaaggtacctatgctggtgccagtgccagtgtctgagccagtgccagagccagaacctgagccagaacctgagcctgttaaagaagaaaaactttcgcctgagcctattttggttgatactgcctctccaagcccaatggaaacatctggatgtgcccctgcagaagaagacctgtgtcaggctttctctgatgtaattcttgcagtaaatgatgtggatgcagaagatggagctgatccaaacctttgtagtgaatatgtgaaagatatttatgcttatctgagacaacttgaggaagagcaagcagtcagaccaaaatacctactgggtcgggaagtcactggaaacatgagagccatcctaattgactggctagtacaggttcaaatgaaattcaggttgttgcaggagaccatgtacatgactgtctccattattgatcggttcatgcagaataattgtgtgcccaagaagatgctgcagctggttggtgtcactgccatgtttattgcaagcaaatatgaagaaatgtaccctccagaaattggtgactttgcttttgtgactgacaacacttatactaagcaccaaatcagacagatggaaatgaagattctaagagctttaaactttggtctgggtcggcctctacctttgcacttccttcggagagcatctaagattggagaggttgatgtcgagcaacatactttggccaaatacctgatggaactaactatgttggactatgacatggtgcactttcctccttctcaaattgcagcaggagctttttgcttagcactgaaaattctggataatggtgaatggacaccaactctacaacattacctgtcatatactgaagaatctcttcttccagttatgcagcacctggctaagaatgtagtcatggtaaatcaaggacttacaaagcacatgactgtcaagaacaagtatgccacatcgaagcatgctaagatcagcactctaccacagctgaattctgcactagttcaagatttagccaaggctgtggcaaaggtgtaacttgtaaacttgagttggagtactatactttacaaactaaaattggcacatgtgcatctgt

SEQ ID NO: 319 - protein, 394 aa, Homo sapiens
MSREMQDVDLAEVKPLVEKGETITGLLQEFDVQEQDIETLHGSVHVTLCGTPKGNRPVILTYHDIGMNHKTCYNPLFNYEDMQEITQHFAVCHVDAPGQQDGAASFPAGYMYPSMDQLAEMLPGVLQQFGLKSIIGMGTGAGAYTLTRFALNNPEMVEGLVLINVNPCAEGWMDWAASKISGWTQALPDMVVSHLFGKEEMQSNVEVVHTYRQHIVNDMNPGNLHLFINAYNSRRDLEIERPMPGTHTVTLQCPALLVVGDSSPAVDAVVECNSKLDPTKTTLLKMADCGGLPQISQPAKLAEAFKYFVQGMGYMPSASMTRLMRSRTASGSSVTSLDGTRSRSHTSEGTRSRSHTSEGTRSRSHTSEGAHLDITPNSGAAGNSAGPKSMEVSC

SEQ ID NO: 320 - DNA, 3020 bp, Homo sapiens
tgaagctcgtcagttcaccatccgccctcggcttccgcggggcgctgggccgccagcctcggcaccgtcctttcctttctccctcgcgttaggcaggtgacagcagggacatgtctcgggagatgcaggatgtagacctcgctgaggtgaagcctttggtggagaaaggggagaccatcaccggcctcctgcaagagtttgatgtccaggagcaggacatcgagactttacatggctctgttcacgtcacgctgtgtgggactcccaagggaaaccggcctgtcatcctcacctaccatgacatcggcatgaaccacaaaacctgctacaaccccctcttcaactacgaggacatgcaggagatcacccagcactttgccgtctgccacgtggacgcccctggccagcaggacggcgcagcctccttccccgcagggtacatgtacccctccatggatcagctggctgaaatgcttcctggagtccttcaacagtttgggctgaaaagcattattggcatgggaacaggagcaggcgcctacaccctaactcgatttgctctaaacaaccctgagatggtggagggccttgtccttatcaacgtgaacccttgtgcggaaggctggatggactgggccgcctccaagatctcaggatggacccaagctctgccggacatggtggtgtcccacctttttgggaaggaagaaatgcagagtaacgtggaagtggtccacacctaccgccagcacattgtgaatgacatgaaccccggcaacctgcacctgttcatcaatgcctacaacagccggcgcgacctggagattgagcgaccaatgccgggaacccacacagtcaccctgcagtgccctgctctgttggtggttggggacagctcgcctgcagtggatgccgtggtggagtgcaactcaaaattggacccaacaaagaccactctcctcaagatggcggactgtggcggcctcccgcagatctcccagccggccaagctcgctgaggccttcaagtacttcgtgcagggcatgggatacatgccctcggctagcatgacccgcctgatgcggtcccgcacagcctctggttccagcgtcacttctctggatggcacccgcagccgctcccacaccagcgagggcacccgaagccgctcccacaccagcgagggcacccgcagccgctcgcacaccagcgagggggcccacctggacatcacccccaactcgggtgctgctgggaacagcgccgggcccaagtccatggaggtctcctgctaggcggcctgcccagctgccgcccccggactctgatctctgtagtggccccctcctccccggccccttttcgccccctgcctgccatactgcgcctaactcggtattaatccaaagcttattttgtaagagtgagctctggtggagacaaatgaggtctattacgtgggtgccctctccaaaggcggggtggcggtggaccaaaggaaggaagcaagcatctccgcatcgcatcctcttccattaaccagtggccggttgccactctcctcccctccctcagagacaccaaactgccaaaaacaagacgcgtagcagcacacacttcacaaagccaagcctaggccgccctgagcatcctggttcaaacgggtgcctggtcagaaggccagccgcccacttcccgtttcctctttaactgaggagaagctgatccagctttccggaaacaaaatccttttcttcatttggggaggggggtaatagtgacatgcaggcacctcttttaaacaggcaaaacaggaagggggaaaaggtgggattcatgtcgaggctagaggcatttggaacaacaaatctacgtagttaacttgaagaaaccgatttttaaagttggtgcatctagaaagctttgaatgcagaagcaaacaagcttgatttttctagcatcctcttaatgtgcagcaaaagcaggcaacaaaatctcctggctttacagacaaaaatatttcagcaaacgttgggcatcatggtttttgaaggctttagttctgctttctgcctctcctccacagccccaacctcccacccctgatacatgagccagtgattattcttgttcagggagaagatcatttagatttgttttgcattccttagaatggagggcaacattccacagctgccctggctgtgatgagtgtccttgcaggggccggagtaggagcactggggtgggggcggaattggggttactcgatgtaagggattccttgttgttgtgttgagatccagtgcagttgtgatttctgtggatcccagcttggtccaggaattttgagagattggcttaaatccagttttcaatcttcgacagctgggctggaacgtgaactcagtagctgaacctgtctgacccggtcacgttcttggatcctcagaactctttgctcttgtcggggtgggggtgggaactcacgtggggagcggtggctgagaaaatgtaaggattctggaatacatattccatggactttccttccctctcctgcttcctcttttcctgctccctaacctttcgccgaatggggcagacaaacactgacgtttctgggtggccagtgcggctgccaggttcctgtactactgccttgtacttttcattttggctcaccgtggattttctcataggaagtttggtcagagtgaattgaatattgtaagtcagccactgggacccgaggatttctgggaccccgcagttgggaggaggaagtagtccagccttccaggtgggcgtgagaggcaatgactcgttacctgccgcccatcaccttggaggccttccctggccttgagtagaaaagtcggggatcggggcaagagaggctgagtacggatgggaaactattgtgcacaagtctttccagaggagtttcttaatgagatatttgtatttatttccagaccaataaatttgtaactttgcaaaaaaaaaaaaaaaaaaaa

SEQ ID NO: 321 - protein, 331 aa, Homo sapiens
MRGYLVAIFLSAVFLYYVLHCILWGTNVYWVAPVEMKRRNKIQPCLSKPAFASLLRFHQFHPFLCAADFRKIASLYGSDKFDLPYGMRTSAEYFRLALSKLQSCDLFDEFDNIPCKKCVVVGNGGVLKNKTLGEKIDSYDVIIRMNNGPVLGHEEEVGRRTTFRLFYPESVFSDPIHNDPNTTVILTAFKPHDLRWLLELLMGDKINTNGFWKKPALNLIYKPYQIRILDPFIIRTAAYELLHFPKVFPKNQKPKHPTTGIIAITLAFYICHEVHLAGFKYNFSDLKSPLHYYGNATMSLMNKNAYHNVTAEQLFLKDIIEKNLVINLTQD

SEQ ID NO: 322 - DNA, 1556 bp, Homo sapiens
ctggcgggagcctgagactccgggcagggctgctccctcctctgctcccccgccagatccgcggggaaggaatcgtgcccgcgccgcccctggcccgcgccaccttcctttggtttctgccggcctcgggcttctgcggcccgatgtggcaggcgccgcgagagaggcagcagccggctggagcagcggcccctcaggtctcggagcccggtgcgcctctgcggtcgtcgctcctgggcctcggcgggtcactcttgccggccggcttcgctgcgggtttgcactgcccgggtgagccagccatgagagggtatcttgtggccatattcctgagtgctgtcttcctctattatgtactgcattgcatattatggggaacgaatgtctattgggtggcacctgtggaaatgaaacggagaaataagatccagccttgtttatcaaagccagcttttgcctctctgctgaggtttcatcagtttcacccttttctgtgtgcggctgattttagaaagattgcttccttgtatggtagcgataagtttgatttgccctatgggatgagaacatcagcggaatattttcgacttgctctttcaaaactgcagagttgtgatctctttgatgagtttgacaacataccctgtaaaaagtgtgtggtggttggtaatggaggagttttgaagaataagacattaggagaaaaaatcgactcctatgatgtaataataagaatgaataatggtcctgttttaggacatgaagaagaagttgggagaaggacaaccttccgacttttttatccagaatctgttttttcagatcctattcacaatgaccctaatacgacagtgattctcactgcttttaagccacatgatttaaggtggctgttggaattgttgatgggtgacaaaataaacactaatggtttttggaagaaaccagccttaaacctgatttataaaccttatcaaatccgaatattagatcctttcattatcagaacagcagcttatgaactgcttcattttccaaaagtgtttcccaaaaatcagaaacctaaacacccaacaacaggaattattgccatcacattggcgttttacatatgtcacgaagttcacctagctggttttaaatacaacttttctgacctcaagagtcctttgcactactatgggaatgccaccatgtctttgatgaataagaacgcgtatcacaatgtgactgcagagcagctctttttgaaggacattatagaaaaaaacctcgtaatcaacttgactcaagattgactctacagactcagaagatgatgctaacagtgttagttttatttttgtactgcaatttttagtttaaaatatgttggatgcactcgtcaaataattatgtatactgtctgttgctgctggtgattcataaccaccagcttaatttctgtgaatactgtatatttaacttatgaaaaccaagaaatgtaaagataacaggaaaataagttttgattgcaatgtttttaaaaaaaaaaaaaaaaaaaaaaaaaaaaaaaa

SEQ ID NO: 323 - protein, 200 aa, Homo sapiens
MGNGLSDQTSILSNLPSFQSFHIVILGLDCAGKTTVLYRLQFNEFVNTVPTKGFNTEKIKVTLGNSKTVTFHFWDVGGQEKLRPLWKSYTRCTDGIVFVVDSVDVERMEEAKTELHKITRISENQGVPVLIVANKQDLRNSLSLSEIEKLLAMGELSSSTPWHLQPTCAIIGDGLKEGLEKLHDMIIKRRKMLRQQKKKR

SEQ ID NO: 324 - DNA, 1077 bp, Homo sapiens
cttatccctgcgtagaaacgcctgccaatgctttctcatttggacccagactccagatcgggagcagtcttatagctggatcagctaccaagagaagttgtaaaccaagaagagaaaagcatttcaatttgggacatttatttgcacctggaaatggggaatgggctgtcagaccagacttctatcctgtccaacctgccttcatttcagtctttccacattgttattctgggtttggactgtgctggaaagacaacagtcttatacaggctgcagttcaatgaatttgtaaataccgtacctaccaaaggatttaacactgagaaaattaaggtaaccttgggaaattctaaaacagtcacttttcacttctgggatgtaggtggtcaggagaaattaaggccactgtggaagtcatataccagatgcacagatggcattgtatttgttgtggactctgttgatgtcgaaaggatggaagaagccaaaactgaacttcacaaaataactaggatatcagaaaatcagggagtccctgtacttatagttgctaacaaacaagatttgaggaactcattgtcactttcagaaattgagaaattgttagcaatgggtgaactgagctcatcaactccttggcatttgcagcctacctgtgcaatcataggagatggcctaaaggaaggacttgagaaactacatgatatgatcattaaaagaagaaaaatgttgcggcaacagaaaaagaaaagatgaatatcaatacctattatatctgtgtggagtaggttttctctggtctgattttgacaaatagaagagtgtctacaccgtcctttgcctgtctgccctcctggatgctattaaagctttgttttgttgaacaatcagatgcccaactctgttgccttgtggaagatgagtaaatgcagtgcttcttaaagtggtctcttctccctaccccacaaatcttttggtactaccatttggggaagccaagcaaggatagtaaattgaccagaacacagttgtgggaatttggtctgaagttagtgaaataaaactttaaagagtgtc

SEQ ID NO: 325 - protein, 3113 aa, Homo sapiens
MSWALEEWKEGLPTRALQKIQELEGQLDKLKKEKQQRQFQLDSLEAAPQKQTQKVENEKTEGTNLKRENQRLMEICESLEKTKQKISHELQVKESQVNFQEGQLNSGKKQIEKLEQELKRCKSELERSQQAAQSADVSLNPCNTPQKIFTTPLTPSQYYSGSKYEDLKEKYNKEVEERKRLEAEVKALQAKKASQTLPQATMNHRDIARHQASSSVFSWQQEKTPSHLSSNSQRTPIRRDFSASYFSGEQEVTPSRSTLQIGKRDANSSFFDNSSSPHLLDQLKAQNQELRNKINELELRLQGHEKEMKGQVNKFQELQLQLEKAKVELIEKEKVLNKCRDELVRTTAQYDQASTKYTALEQKLKKLTEDLSCQRQNAESARCSLEQKIKEKEKEFQEELSRQQRSFQTLDQECIQMKARLTQELQQAKNMHNVLQAELDKLTSVKQQLENNLEEFKQKLCRAEQAFQASQIKENELRRSMEEMKKENNLLKSHSEQKAREVCHLEAELKNIKQCLNQSQNFAEEMKAKNTSQETMLRDLQEKINQQENSLTLEKLKLAVADLEKQRDCSQDLLKKREHHIEQLNDKLSKTEKESKALLSALELKKKEYELKEEKTLFSCWKSENEKLLTQMESEKENLQSKINHLETCLKTQQIKSHEYNERVRTLEMDRENLSVEIRNLHNVLDSKSVEVETQKLAYMELQQKAEFSDQKHQKEIENMCLKTSQLTGQVEDLEHKLQLLSNEIMDKDRCYQDLHAEYESLRDLLKSKDASLVTNEDHQRSLLAFDQQPAMHHSFANIIGEQGSMPSERSECRLEADQSPKNSAILQNRVDSLEFSLESQKQMNSDLQKQCEELVQIKGEIEENLMKAEQMHQSFVAETSQRISKLQEDTSAHQNVVAETLSALENKEKELQLLNDKVETEQAEIQELKKSNHLLEDSLKELQLLSETLSLEKKEMSSIISLNKREIEELTQENGTLKEINASLNQEKMNLIQKSESFANYIDEREKSISELSDQYKQEKLILLQRCEETGNAYEDLSQKYKAAQEKNSKLECLLNECTSLCENRKNELEQLKEAFAKEHQEFLTKLAFAEERNQNLMLELETVQQALRSEMTDNQNNSKSEAGGLKQEIMTLKEEQNKMQKEVNDLLQENEQLMKVMKTKHECQNLESEPIRNSVKERESERNQCNFKPQMDLEVKEISLDSYNAQLVQLEAMLRNKELKLQESEKEKECLQHELQTIRGDLETSNLQDMQSQEISGLKDCEIDAEEKYISGPHELSTSQNDNAHLQCSLQTTMNKLNELEKICEILQAEKYELVTELNDSRSECITATRKMAEEVGKLLNEVKILNDDSGLLHGELVEDIPGGEFGEQPNEQHPVSLAPLDESNSYEHLTLSDKEVQMHFAELQEKFLSLQSEHKILHDQHCQMSSKMSELQTYVDSLKAENLVLSTNLRNFQGDLVKEMQLGLEEGLVPSLSSSCVPDSSSLSSLGDSSFYRALLEQTGDMSLLSNLEGAVSANQCSVDEVFCSSLQEENLTRKETPSAPAKGVEELESLCEVYRQSLEKLEEKMESQGIMKNKEIQELEQLLSSERQELDCLRKQYLSENEQWQQKLTSVTLEMESKLAAEKKQTEQLSLELEVARLQLQGLDLSSRSLLGIDTEDAIQGRNESCDISKEHTSETTERTPKHDVHQICDKDAQQDLNLDIEKITETGALKPTGECSGEQSPDTNYEPPGEDKTQGSSECISELSFSGPNALVPMDFLGNQEDIHNLQLRVKETSNENLRLLHVIEDRDRKVESLLNEMKELDSKLHLQEVQLMTKIEACIELEKIVGELKKENSDLSEKLEYFSCDHQELLQRVETSEGLNSDLEMHADKSSREDIGDNVAKVNDSWKERFLDVENELSRIRSEKASIEHEALYLEADLEVVQTEKLCLEKDNENKQKVIVCLEEELSVVTSERNQLRGELDTMSKKTTALDQLSEKMKEKTQELESHQSECLHCIQVAEAEVKEKTELLQTLSSDVSELLKDKTHLQEKLQSLEKDSQALSLTKCELENQIAQLNKEKELLVKESESLQARLSESDYEKLNVSKALEAALVEKGEFALRLSSTQEEVHQLRRGIEKLRVRIEADEKKQLHIAEKLKERERENDSLKDKVENLERELQMSEENQELVILDAENSKAEVETLKTQIEEMARSLKVFELDLVTLRSEKENLTKQIQEKQGQLSELDKLLSSFKSLLEEKEQAEIQIKEESKTAVEMLQNQLKELNEAVAALCGDQEIMKATEQSLDPPIEEEHQLRNSIEKLRARLEADEKKQLCVLQQLKESEHHADLLKGRVENLERELEIARTNQEHAALEAENSKGEVETLKAKIEGMTQSLRGLELDVVTIRSEKENLTNELQKEQERISELEIINSSFENILQEKEQEKVQMKEKSSTAMEMLQTQLKELNERVAALHNDQEACKAKEQNLSSQVECLELEKAQLLQGLDEAKNNYIVLQSSVNGLIQEVEDGKQKLEKKDEEISRLKNQIQDQEQLVSKLSQVEGEHQLWKEQNLELRNLTVELEQKIQVLQSKNASLQDTLEVLQSSYKNLENELELTKMDKMSFVEKVNKMTAKETELQREMHEMAQKTAELQEELSGEKNRLAGELQLLLEEIKSSKDQLKELTLENSELKKSLDCMHKDQVEKEGKVREEIAEYQLRLHEAEKKHQALLLDTNKQYEVEIQTYREKLTSKEECLSSQKLEIDLLKSSKEELNNSLKATTQILEELKKTKMDNLKYVNQLKKENERAQGKMKLLIKSCKQLEEEKEILQKELSQLQAAQEKQKTGTVMDTKVDELTTEIKELKETLEEKTKEADEYLDKYCSLLISHEKLEKAKEMLETQVAHLCSQQSKQDSRGSPLLGPVVPGPSPIPSVTEKRLSSGQNKASGKRQRSSGIWENGGGPTPATPESFSKKSKKAVMSGIHPAEDTEGTEFEPEGLPEVVKKGFADIPTGKTSPYILRRTTMATRTSPRLAAQKLALSPLSLGKENLAESSKPTAGGSRSQKVKVAQRSPVDSGTILREPTTKSVPVNNLPERSPTDSPREGLRVKRGRLVPSPKAGLESKGSENCKVQ

SEQ ID NO: 326 - DNA, 10211 bp, Homo sapiens
gagaggtcgttttcccgtccccgagagcaagtttatttacaaatgttggagtaataaagaaggcagaacaaaatgagctgggctttggaagaatggaaagaagggctgcctacaagagctcttcagaaaattcaagagcttgaaggacagcttgacaaactgaagaaggaaaagcagcaaaggcagtttcagcttgacagtctcgaggctgcgcctcagaagcaaacacagaaggttgaaaatgaaaaaaccgagggtacaaacctgaaaagggagaatcaaagattgatggaaatatgtgaaagtctggagaaaactaagcagaagatttctcatgaacttcaagtcaaggagtcacaagtgaatttccaggaaggacaactgaattcaggcaaaaaacaaatagaaaaactggaacaggaacttaaaaggtgtaaatctgagcttgaaagaagccaacaagctgcgcagtctgcagatgtctctctgaatccatgcaatacaccacaaaaaatttttacaactccactaacaccaagtcaatattatagtggttccaagtatgaagatctaaaagaaaaatataataaagaggttgaagaacgaaaaagattagaggcagaggttaaagccttgcaggctaaaaaagcaagccagactcttccacaagccaccatgaatcaccgcgacattgcccggcatcaggcttcatcatctgtgttctcatggcagcaagagaagaccccaagtcatctttcatctaattctcaaagaactccaattaggagagatttctctgcatcttacttttctggggaacaagaggtgactccaagtcgatcaactttgcaaatagggaaaagagatgctaatagcagtttctttgacaattctagcagtcctcatcttttggatcaattaaaagcgcagaatcaagagctaagaaacaagattaatgagttggaactacgcctgcaaggacatgaaaaagaaatgaaaggccaagtgaataagtttcaagaactccaactccaactggagaaagcaaaagtggaattaattgaaaaagagaaagttttgaacaaatgtagggatgaactagtgagaacaacagcacaatacgaccaggcgtcaaccaagtatactgcattggaacaaaaactgaaaaaattgacggaagatttgagttgtcagcgacaaaatgcagaaagtgccagatgttctctggaacagaaaattaaggaaaaagaaaaggagtttcaagaggagctctcccgtcaacagcgttctttccaaacactggaccaggagtgcatccagatgaaggccagactcacccaggagttacagcaagccaagaatatgcacaacgtcctgcaggctgaactggataaactcacatcagtaaagcaacagctagaaaacaatttggaagagtttaagcaaaagttgtgcagagctgaacaggcgttccaggcgagtcagatcaaggagaatgagctgaggagaagcatggaggaaatgaagaaggaaaacaacctccttaagagtcactctgagcaaaaggccagagaagtctgccacctggaggcagaactcaagaacatcaaacagtgtttaaatcagagccagaattttgcagaagaaatgaaagcgaagaatacctctcaggaaaccatgttaagagatcttcaagaaaaaataaatcagcaagaaaactccttgactttagaaaaactgaagcttgctgtggctgatctggaaaagcagcgagattgttctcaagaccttttgaagaaaagagaacatcacattgaacaacttaatgataagttaagcaagacagagaaagagtccaaagccttgctgagtgctttagagttaaaaaagaaagaatatgaattgaaagaagagaaaactctgttttcttgttggaaaagtgaaaacgaaaaacttttaactcagatggaatcagaaaaggaaaacttgcagagtaaaattaatcacttggaaacttgtctgaagacacagcaaataaaaagtcatgaatacaacgagagagtaagaacgctggagatggacagagaaaacctaagtgtcgagatcagaaaccttcacaacgtgttagacagtaagtcagtggaggtagagacccagaaactagcttatatggagctacagcagaaagctgagttctcagatcagaaacatcagaaggaaatagaaaatatgtgtttgaagacttctcagcttactgggcaagttgaagatctagaacacaagcttcagttactgtcaaatgaaataatggacaaagaccggtgttaccaagacttgcatgccgaatatgagagcctcagggatctgctaaaatccaaagatgcttctctggtgacaaatgaagatcatcagagaagtcttttggcttttgatcagcagcctgccatgcatcattcctttgcaaatataattggagaacaaggaagcatgccttcagagaggagtgaatgtcgtttagaagcagaccaaagtccgaaaaattctgccatcctacaaaatagagttgattcacttgaattttcattagagtctcaaaaacagatgaactcagacctgcaaaagcagtgtgaagagttggtgcaaatcaaaggagaaatagaagaaaatctcatgaaagcagaacagatgcatcaaagttttgtggctgaaacaagtcagcgcattagtaagttacaggaagacacttctgctcaccagaatgttgttgctgaaaccttaagtgcccttgagaacaaggaaaaagagctgcaacttttaaatgataaggtagaaactgagcaggcagagattcaagaattaaaaaagagcaaccatctacttgaagactctctaaaggagctacaacttttatccgaaaccctaagcttggagaagaaagaaatgagttccatcatttctctaaataaaagggaaattgaagagctgacccaagagaatgggactcttaaggaaattaatgcatccttaaatcaagagaagatgaacttaatccagaaaagtgagagttttgcaaactatatagatgaaagggagaaaagcatttcagagttatctgatcagtacaagcaagaaaaacttattttactacaaagatgtgaagaaaccggaaatgcatatgaggatcttagtcaaaaatacaaagcagcacaggaaaagaattctaaattagaatgcttgctaaatgaatgcactagtctttgtgaaaataggaaaaatgagttggaacagctaaaggaagcatttgcaaaggaacaccaagaattcttaacaaaattagcatttgctgaagaaagaaatcagaatctgatgctagagttggagacagtgcagcaagctctgagatctgagatgacagataaccaaaacaattctaagagcgaggctggtggtttaaagcaagaaatcatgactttaaaggaagaacaaaacaaaatgcaaaaggaagttaatgacttattacaagagaatgaacagctgatgaaggtaatgaagactaaacatgaatgtcaaaatctagaatcagaaccaattaggaactctgtgaaagaaagagagagtgagagaaatcaatgtaattttaaacctcagatggatcttgaagttaaagaaatttctctagatagttataatgcgcagttggtgcaattagaagctatgctaagaaataaggaattaaaacttcaggaaagtgagaaggagaaggagtgcctgcagcatgaattacagacaattagaggagatcttgaaaccagcaatttgcaagacatgcagtcacaagaaattagtggccttaaagactgtgaaatagatgcggaagaaaagtatatttcagggcctcatgagttgtcaacaagtcaaaacgacaatgcacaccttcagtgctctctgcaaacaacaatgaacaagctgaatgagctagagaaaatatgtgaaatactgcaggctgaaaagtatgaactcgtaactgagctgaatgattcaaggtcagaatgtatcacagcaactaggaaaatggcagaagaggtagggaaactactaaatgaagttaaaatattaaatgatgacagtggtcttctccatggtgagttagtggaagacataccaggaggtgaatttggtgaacaaccaaatgaacagcaccctgtgtctttggctccattggacgagagtaattcctacgagcacttgacattgtcagacaaagaagttcaaatgcactttgccgaattgcaagagaaattcttatctttacaaagtgaacacaaaattttacatgatcagcactgtcagatgagctctaaaatgtcagagctgcagacctatgttgactcattaaaggccgaaaatttggtcttgtcaacgaatctgagaaactttcaaggtgacttggtgaaggagatgcagctgggcttggaggaggggctcgttccatccctgtcatcctcttgtgtgcctgacagctctagtcttagcagtttgggagactcctccttttacagagctcttttagaacagacaggagatatgtctcttttgagtaatttagaaggggctgtttcagcaaaccagtgcagtgtagatgaagtattttgcagcagtctgcaggaggagaatctgaccaggaaagaaaccccttcggccccagcgaagggtgttgaagagcttgagtccctctgtgaggtgtaccggcagtccctcgagaagctagaagagaaaatggaaagtcaagggattatgaaaaataaggaaattcaagagctcgagcagttattaagttctgaaaggcaagagcttgactgccttaggaagcagtatttgtcagaaaatgaacagtggcaacagaagctgacaagcgtgactctggagatggagtccaagttggcggcagaaaagaaacagacggaacaactgtcacttgagctggaagtagcacgactccagctacaaggtctggacttaagttctcggtctttgcttggcatcgacacagaagatgctattcaaggccgaaatgagagctgtgacatatcaaaagaacatacttcagaaactacagaaagaacaccaaagcatgatgttcatcagatttgtgataaagatgctcagcaggacctcaatctagacattgagaaaataactgagactggtgcattgaaacccacaggagagtgctctggggaacagtccccagataccaattatgagcctccaggggaagataaaacccagggctcttcagaatgcatttctgaattgtcattttctggtcctaatgctttggtacctatggatttcctggggaatcaggaagatatccataatcttcaactgcgggtaaaagagacatcaaatgagaatttgagattacttcatgtgatagaggaccgtgacagaaaagttgaaagtttgctaaatgaaatgaaagaattagactcaaaactccatttacaggaggtacaactaatgaccaaaattgaagcatgcatagaattggaaaaaatagttggggaacttaagaaagaaaactcagatttaagtgaaaaattggaatatttttcttgtgatcaccaggagttactccagagagtagaaacttctgaaggcctcaattctgatttagaaatgcatgcagataaatcatcacgtgaagatattggagataatgtggccaaggtgaatgacagctggaaggagagatttcttgatgtggaaaatgagctgagtaggatcagatcggagaaagctagcattgagcatgaagccctctacctggaggctgacttagaggtagttcaaacagagaagctatgtttagaaaaagacaatgaaaataagcagaaggttattgtctgccttgaagaagaactctcagtggtcacaagtgagagaaaccagcttcgtggagaattagatactatgtcaaaaaaaaccacggcactggatcagttgtctgaaaaaatgaaggagaaaacacaagagcttgagtctcatcaaagtgagtgtctccattgcattcaggtggcagaggcagaggtgaaggaaaagacggaactccttcagactttgtcctctgatgtgagtgagctgttaaaagacaaaactcatctccaggaaaagctgcagagtttggaaaaggactcacaggcactgtctttgacaaaatgtgagctggaaaaccaaattgcacaactgaataaagagaaagaattgcttgtcaaggaatctgaaagcctgcaggccagactgagtgaatcagattatgaaaagctgaatgtctccaaggccttggaggccgcactggtggagaaaggtgagttcgcattgaggctgagctcaacacaggaggaagtgcatcagctgagaagaggcatcgagaaactgagagttcgcattgaggccgatgaaaagaagcagctgcacatcgcagagaaactgaaagaacgcgagcgggagaatgattcacttaaggataaagttgagaaccttgaaagggaattgcagatgtcagaagaaaaccaggagctagtgattcttgatgccgagaattccaaagcagaagtagagactctaaaaacacaaatagaagagatggccagaagcctgaaagtttttgaattagaccttgtcacgttaaggtctgaaaaagaaaatctgacaaaacaaatacaagaaaaacaaggtcagttgtcagaactagacaagttactctcttcatttaaaagtctgttagaagaaaaggagcaagcagagatacagatcaaagaagaatctaaaactgcagtggagatgcttcagaatcagttaaaggagctaaatgaggcagtagcagccttgtgtggtgaccaagaaattatgaaggccacagaacagagtctagacccaccaatagaggaagagcatcagctgagaaatagcattgaaaagctgagagcccgcctagaagctgatgaaaagaagcagctctgtgtcttacaacaactgaaggaaagtgagcatcatgcagatttacttaagggtagagtggagaaccttgaaagagagctagagatagccaggacaaaccaagagcatgcagctcttgaggcagagaattccaaaggagaggtagagaccctaaaagcaaaaatagaagggatgacccaaagtctgagaggtctggaattagatgttgttactataaggtcagaaaaagaaaatctgacaaatgaattacaaaaagagcaagagcgaatatctgaattagaaataataaattcatcatttgaaaatattttgcaagaaaaagagcaagagaaagtacagatgaaagaaaaatcaagcactgccatggagatgcttcaaacacaattaaaagagctcaatgagagagtggcagccctgcataatgaccaagaagcctgtaaggccaaagagcagaatcttagtagtcaagtagagtgtcttgaacttgagaaggctcagttgctacaaggccttgatgaggccaaaaataattatattgttttgcaatcttcagtgaatggcctcattcaagaagtagaagatggcaagcagaaactggagaagaaggatgaagaaatcagtagactgaaaaatcaaattcaagaccaagagcagcttgtctctaaactgtcccaggtggaaggagagcaccaactttggaaggagcaaaacttagaactgagaaatctgacagtggaattggagcagaagatccaagtgctacaatccaaaaatgcctctttgcaggacacattagaagtgctgcagagttcttacaagaatctagagaatgagcttgaattgacaaaaatggacaaaatgtcctttgttgaaaaagtaaacaaaatgactgcaaaggaaactgagctgcagagggaaatgcatgagatggcacagaaaacagcagagctgcaagaagaactcagtggagagaaaaataggctagctggagagttgcagttactgttggaagaaataaagagcagcaaagatcaattgaaggagctcacactagaaaatagtgaattgaagaagagcctagattgcatgcacaaagaccaggtggaaaaggaagggaaagtgagagaggaaatagctgaatatcagctacggcttcatgaagctgaaaagaaacaccaggctttgcttttggacacaaacaaacagtatgaagtagaaatccagacataccgagagaaattgacttctaaagaagaatgtctcagttcacagaagctggagatagaccttttaaagtctagtaaagaagagctcaataattcattgaaagctactactcagattttggaagaattgaagaaaaccaagatggacaatctaaaatatgtaaatcagttgaagaaggaaaatgaacgtgcccaggggaaaatgaagttgttgatcaaatcctgtaaacagctggaagaggaaaaggagatactgcagaaagaactctctcaacttcaagctgcacaggagaagcagaaaacaggtactgttatggataccaaggtcgatgaattaacaactgagatcaaagaactgaaagaaactcttgaagaaaaaaccaaggaggcagatgaatacttggataagtactgttccttgcttataagccatgaaaagttagagaaagctaaagagatgttagagacacaagtggcccatctgtgttcacagcaatctaaacaagattcccgagggtctcctttgctaggtccagttgttccaggaccatctccaatcccttctgttactgaaaagaggttatcatctggccaaaataaagcttcaggcaagaggcaaagatccagtggaatatgggagaatggtggaggaccaacacctgctaccccagagagcttttctaaaaaaagcaagaaagcagtcatgagtggtattcaccctgcagaagacacggaaggtactgagtttgagccagagggacttccagaagttgtaaagaaagggtttgctgacatcccgacaggaaagactagcccatatatcctgcgaagaacaaccatggcaactcggaccagcccccgcctggctgcacagaagttagcgctatccccactgagtctcggcaaagaaaatcttgcagagtcctccaaaccaacagctggtggcagcagatcacaaaaggtcaaagttgctcagcggagcccagtagattcaggcaccatcctccgagaacccaccacgaaatccgtcccagtcaataatcttcctgagagaagtccgactgacagccccagagagggcctgagggtcaagcgaggccgacttgtccccagccccaaagctggactggagtccaagggcagtgagaactgtaaggtccagtgaaggcactttgtgtgtcagtacccctgggaggtgccagtcattgaatagataaggctgtgcctacaggacttctctttagtcagggcatgctttattagtgaggagaaaacaattccttagaagtcttaaatatattgtactctttagatctcccatgtgtaggtattgaaaaagtttggaagcactgatcacctgttagcattgccattcctctactgcaatgtaaatagtataaagctatgtatataaagctttttggtaatatgttacaattaaaatgacaagcactatatcacaatctctgtttgtatgtgggttttacactaaaaaaatgcaaaacacattttattcttctaattaacagctcctaggaaaatgtagacttttgctttatgatattctatctgtagtatgaggcatggaatagttttgtatcgggaatttctcagagctgagtaaaatgaaggaaaagcatgttatgtgtttttaaggaaaatgtgcacacatatacatgtaggagtgtttatctttctcttacaatctgttttagacatctttgcttatgaaacctgtacatatgtgtgtgtgggtatgtgtttatttccagtgagggctgcaggcttcctagaggtgtgctataccatgcgtctgtcgttgtgcttttttctgtttttagaccaattttttacagttctttggtaagcattgtcgtatctggtgatggattaacatatagcctttgttttctaataaaatagtcgccttcgttttctgtaaaaaaaaaaaaaaaaaaaaaa

SEQ ID NO: 327 - protein, 325 aa, Homo sapiens
MTERRRDELSEEINNLREKVMKQSEENNNLQSQVQKLTEENTTLREQVEPTPEDEDDDIELRGAAAAAAPPPPIEEECPEDLPEKFDGNPDMLAPFMAQCQIFMEKSTRDFSVDRVRVCFVTSMMTGRAARWASAKLERSHYLMHNYPAFMMEMKHVFEDPQRREVAKRKIRRLRQGMGSVIDYSNAFQMIAQDLDWNEPALIDQYHEGLSDHIQEELSHLEVAKSLSALIGQCIHIERRLARAAAARKPRSPPRALVLPHIASHHQVDPTEPVGGARMRLTQEEKERRRKLNLCLYCGTGGHYADNCPAKASKSSPAGNSPAPL

SEQ ID NO: 328 - DNA, 6253 bp, Homo sapiens
gtaacaaccgtcaccctgggtcccgactgcccacctcctcctcctccccctccccccaacaacaacaacaacaacaactccaagcacaccggccataagagtgcgtgtgtccccaacatgaccgaacgaagaagggacgagctctctgaagagatcaacaacttaagagagaaggtcatgaagcagtcggaggagaacaacaacctgcagagccaggtgcagaagctcacagaggagaacaccacccttcgagagcaagtggaacccacccctgaggatgaggatgatgacatcgagctccgcggtgctgcagcagctgctgccccaccccctccaatagaggaagagtgcccagaagacctcccagagaagttcgatggcaacccagacatgctggctcctttcatggcccagtgccagatcttcatggaaaagagcaccagggatttctcagttgatcgtgtccgtgtctgcttcgtgacaagcatgatgaccggccgtgctgcccgttgggcctcagcaaagctggagcgctcccactacctgatgcacaactacccagctttcatgatggaaatgaagcatgtctttgaagaccctcagaggcgagaggttgccaaacgcaagatcagacgcctgcgccaaggcatggggtctgtcatcgactactccaatgctttccagatgattgcccaggacctggattggaacgagcctgcgctgattgaccagtaccacgagggcctcagcgaccacattcaggaggagctctcccacctcgaggtcgccaagtcgctgtctgctctgattgggcagtgcattcacattgagagaaggctggccagggctgctgcagctcgcaagccacgctcgccaccccgggcgctggtgttgcctcacattgcaagccaccaccaggtagatccaaccgagccggtgggaggtgcccgcatgcgcctgacgcaggaagaaaaagaaagacgcagaaagctgaacctgtgcctctactgtggaacaggaggtcactacgctgacaattgtcctgccaaggcctcaaagtcttcgccggcgggaaactccccggccccgctgtagagggaccttcagcgaccgggccagaaataataaggtccccacaagatgatgcctcatctccacacttgcaagtgatgctccagattcatcttccgggcagacacaccctgttcgtccgagccatgatcgattctggtgcttctggcaacttcattgatcacgaatatgttgctcaaaatggaattcctctaagaatcaaggactggccaatacttgtggaagcaattgatgggcgccccatagcatcgggcccagttgtccacgaaactcacgacctgatagttgacctgggagatcaccgagaggtgctgtcatttgatgtgactcagtctccattcttccctgtcgtcctaggggttcgctggctgagcacacatgatcccaatatcacatggagcactcgatctatcgtctttgattctgaatactgccgctaccactgccggatgtattctccaataccaccatcgctcccaccaccagcaccacaaccgccactctattatccagtagatggatacagagtttaccaaccagtgaggtattactatgtccagaatgtgtacactccagtagatgagcacgtctacccagatcaccgcctggttgaccctcacatagaaatgatacctggagcacacagtattcccagtggacatgtgtattcactgtccgaacctgaaatggcagctcttcgagattttgtggcaagaaatgtaaaagatgggctaattactccaacgattgcacctaatggagcccaagttctccaggtgaagagggggtggaaactgcaagtttcttatgattgccgagctccaaacaattttactatccagaatcagtatcctcgcctatctattccaaatttagaagaccaagcacacctggcaacgtacactgaattcgtacctcaaatacctggataccaaacataccccacatatgccgcgtacccgacctacccagtaggattcgcctggtacccagtgggacgagacggacaaggaagatcactatatgtacctgtgatgatcacttggaatccacactggtaccgccagcctccggtaccacagtacccgccgccacagccgccgcctccaccaccaccaccgccgccgcctccatcttacagtaccctgtaaatacctgtcatgtccttcaggatctctgccctcaaaatttattcctgttcagcttctcaatcagtgactgtgtgctaaattttaggctactgtatcttcaggccacctgaggcacatcctctctgaaacggctatggaaggttagggccactctggactggcacacatcctaaagcaccaaaagaccttcaacattttctgagagcaacagagtatttgccaataaatgatctctcatttttccaccttgactgccaatctaactaaaataattaataagtttactttccagccagtcctggaagtctgggttttacctgccaaaacctccatcaccatctaaattataggctgccaaatttgctgtttaacatttacagagaagctgatacaaacgcaggaaatgctgatttctttatggagggggagacgaggaggaggaggacatgacttttcttgcggtttcggtaccctctttttaaatcactggaggactgaggccttattaaggaagccaaaattatcggtgcagtgtggaaaggcttccgtgatcctctcgctgcacccttagaaacttcaccgtcttcaaactccatttccatggttctgttaattctcaaggagcagcaactcgactggttctcccaggagcaggaaaaacccttgtgacatgaaacatctcaggcctgaaaagaaagtgctctctcagatggactcttgcatgttaagactatgtcttcacatcatggtgcaaatcacatgtacccaatgactccggctttgacacaacaccttaccatcatcatgccatgatggcttccacaaagcattaaacctggtaaccagagattactggtggctccagcgttgttagatgttcatgaaatgtgaccacctctcaatcacctttgagggctaaagagtagcacatcaaaaggactccaaaatcccatacccaactcttaagagatttgtcctggtacttcagaaagaattttcatgagtgttcttaattggctggaaaagcaccagctgacgttttggaagaatctatccatgtgtctgcctccatatgcatctgggcatttcatcttcagtcccctcattagactgtagcattaggatgtgtggagagaggagaaatgatttagcacccagattcacactcctatgcctggaagggggacatctttgaagaagaggaattagggctgtggacactgtcttgaggatgtggacttccttagtgagctccacattacttgatggtaaccacttcaaaaggatcagaatccacgtaatgaaaaaggtccctctagaggatggagctgatgtgaagctgccaatggatgaaaagcctcagaaagcaactcaaaggactcaaagcaacggacaacacaagagttgtcttcagcccagtgacacctctgatgtcccctggaagctttgtgctaacctgggactgcctgacttcctttagcctggtcccttgctactaccttgaactgttttatctaacctctctttttctgtttaattctttgctactgccattgaccctgctgcaggatttgtgtcattttcctgcctggttgctgagactccattttgctgccacacacagagatgtaagaggcaggctttaattgccaaagcacagtttgagcagtagaaaacaacatggtgtatatctcaaattgcctgacatgaagaggagtctaacggtgaagtttcacttttcatcagcatcatctttcacatgttcattatcatccgctcttattcttgcatgtttaaacacttaaaatttttagtataatttttagtgtgttttgaagtggtgactaggctttcaaaaacttccattgaattacaaagcactatccagttcttattgttaaactaagtaaaaatgataagtaacatagtgtaaaatattcctttactgtgaacttcttacaatgctgtgaatgagaggctcctcagaactggagcatttgtataataattcatcctgttcatcttcaattttaacatcatatataatttcaattctatcaattgggcctttaaaaatcatataaaaggatataaaatttgaaaagagaaacctaattggctatttaatccaaaacaacttttttttttccttcaatggaatcagaaagcttgtcaatcactcatgtgttttagagtaattacttttaaaatggtgcatttgtgcttctgaactattttgaagagtcacttctgtttacctcaagtatcaattcatcctccatacatttgaattcaagttgttttttgtcaaatttacagttgtcaattgatcttcaagctgcagggtgcctagaaatgggccgttgtctgtagccctggcatgtgcacacggacatttgccaccactgcaagcaaaagtctggagaagttcaccaacgacaagaacgattagggaaaatatgctgctgtgggttaacaactcagaaagtccctgatccacatttggctgtttactaaagcttgtgattaactttttggcagtgtgtactatgctctattgctatatatgctatctataaatgtagatgttaaggataagtaattctaaatttattattctatagttttgaagtttggttaagtttcctttcactcaattgatttattttgttgttaatcaaatttatgttaattggatcctttaaattttttttggcattttccaacaaaaatggctttattcataagaaaggaaaaaaatcaatggaatttgatatctaaagaagttagaaagggagcaaaataaaaaacataaaggagatagatgaattagtaagcaaatcagtagtcgagtttttcaaactggcaaaattaattaattgacttttagcccaaatttacattgttaattaaatcaagaaggaagaagatctaagagctcccattgataggcaagcctagagagaactagctaaatttatcatgctaggatattgaaacacagaaagtttacatacatttatgaagggtcaatttagtttggacagtgaggtatttgtcttagtggaaaaaaggagaattagtctgatcaaatcgtgaagtaatacagtgaacttgcaggtgcacaaaataagagggccacatctatatggtgcagtctggaattctgtttaagtttgtaggtacctcttggacttctgaattgatccagttgtcatccaccacagacatctcacatcagatacagacagttccaagattgacaacagagaacaacctgctggaaagacctgggcagaaatggagagccctgcgggaaccatgctacattttcatctaaagagagaatgcacatctgatgagactgaaagttctttgttgttttagattgtagaatggtattgaattggtctgtggaaaattgcattgcttttatttctttgtgtaatcaagtttaagtaataggggatatataatcataagcattttagggtgggagggactattaagtaattttaagtgggtggggttatttagaatgttagaataatattatgtattagatatcgctataagtggacatgcgtacttacttgtaaccctttaccctataattgctatccttaaagatttcaaataaactcggagggaactgcagggagaccaacttatttagagcgaattggacatggataaaaaccccagtgggagaaagttcaaaggtgattagattaataatttaatagaggatgagtgacctctgataaattactgctagaatgaacttgtcaatgatggatggtaaattttcatggaagttataaaagtgataaataaaaacccttgcttttacccctgtcagtagccctcctcctaccactgaaccccattgcccctacccctccttctaactttattgctgtattctcttcactctatatttctctctatttgctaatattgcattgctgttacaataaaaattcaataaagatttagtggttaagtgc

SEQ ID NO: 329 - protein, 447 aa, Homo sapiens
RECISVHVGQAGVQMGNACWELYCLEHGIQPDGQMPSDKTIGGGDDSFTTFFCETGAGKHVPRAVFVDLEPTVIDEIRNGPYRQLFHPEQLITGKEDAANNYARGHYTIGKEIIDPVLDRIRKLSDQCTGLQGFLVFHSFGGGTGSGFTSLLMERLSVDYGKKSKLEFSIYPAPQVSTAVVEPYNSILTTHTTLEHSDCAFMVDNEAIYDICRRNLDIERPTYTNLNRLISQIVSSITASLRFDGALNVDLTEFQTNLVPYPRIHFPLATYAPVISAEKAYHEQLSVAEITNACFEPANQMVKCDPRHGKYMACCLLYRGDVVPKDVNAAIAAIKTKRSIQFVDWCPTGFKVGINYQPPTVVPGGDLAKVQRAVCMLSNTTAIAEAWARLDHKFDLMYAKRAFVHWYVGEGMEEGEFSEAREDMAALEKDYEEVGIDSYEDEDEGEE

SEQ ID NO: 330 - DNA, 6826 bp, Homo sapiens
atgcctgtaatcccagcactttgggaggttgaggcgggtggatcgcttgagctcaggagttcaagacaaatctggacaatatggcgagaccttgtctctactaaaaatacaaaaaataaggccgggtgtgggggctcacacctgtaatcccagcactttgggaggctgaagcaggtggatcatctaaggtcaggagttggagaccagcctgaccaacatggtgaaaccccgtctctactaaaaatacaaaaatcatccaggcatccatgcctgtaatcccagctactccagaggctgaggcaggagaatcgctagaacccgcgaggcaggtgttgaggtgagccgaaatcgtgccattgcactccagcctgggcaacaagagcgaaactccatctcaaaaatagataaataaataaaataagctgggcatggtggtggtgcacgcctgtggtctcagctactgaggaggctgaggtggaaggatgaggtagaaggatggccttgagccgggagatggaggttgcaatgagctgagattgcaccactgcactctagcctgggtgacacagcaagacactgactcaaaagagagagagagagagagaaagagaaagcagaagtagcttgaaaagatggggtggagagaacggaatgaaatgtagaaagaagggcttctgcggagaccaggggctgagtgctgagaccattaaggtgcgggttgcagatcctgctcttgggttagagacagaagagaccaagagtcagaatcatccaagatatgagaatctcgattttcttcttttctcttcagaggcaacagacattttgatagcttacaacaatgtttccactatgacatcactgtctccttttcacccacgaaaatgtcaaggactcagtgaggttaagtcacttgctcaaggtcacacagggtagcctggaggagaatccaggtcctgaggtcccccggtcagcgctcccgcagttctggcagcaggggagtgggcaggtgcccgcagcgagggcatcatagtgactgcgctgatgacagcgccactgacccgcgggcggccggcgagccgcggcagattccggggtcggccccggcagacaggctgcggggctcgactctgcgggagcgcctaaggcattggcaatctggggctcaggctgtgcagttctgggtcctcggccgcccacaggcgtcggcgaaaggctgccgccccggccggggaccaggaagcgtcaggcagctggcaagggctccccggggacgcgccacagcctcacagccggcccgagtctcctgggaggcagggctggaagggcaggggtgaaggccagctgtggccgcttgggaaggaccgcctcgcctgctcccgacctaagtcagaacacctggatgaccggtgcctccaggacgcaggtgcaggtgagactcgccctgccacagcaccctgcatctccgcggaggccctcgggagcccagcgtgtctgctcaaaacgaggaaagaatggttaaagcccgaatcgcgactcttaatcccagcgggacaggtgagggacccccgcgcagcttggggagggtaccaggccaggctccgcccctcgggggggccgcttaccctcccgggaggcgtggcctgcgggccgcccagcctctagtgggcgagcggggaacgcgggccccgccccccccccgcctataagggcggtgcggcactgcagctagcgcagttctcactgagacctgtcaccccgactcaacgtgagacgcaccgcccggactcaccatggtgagtgcggcccggccggggtcgcgcctgtcccctaattgcccctgtcctttgggggacacttcttccaggcatgctcggggacctccaccgggcgttccgggtctcaggaggtgcgagggttttgcatcctccctccccaaccccctcctggtgactttggccgagccgtatagttcaccttcggtggctggggttggggcttggggtggagtgcgactcttcagtaacagagaggaacccttcctggcactctgctcctgccttacgagcatttgtgtcccgactctgtatgagagtcacgcgggcccgcgccccgtcctttccgcgggcaaaagaagacgggtttggctgccctcttacatccccagtccctggtcctcagcactgaccgagcacgtgcttggcgctagaaggtggaaggggtcaggttacctggtgccgcatccccctttcctctgtgtatgcattccaactatccacagaaccaccccccccccgtgactcagcaccccgcgtctgagctgagagggttggtgggaacggggttcggcctcctgaagcgagctggccctctccagccgaagcccgggtgcgcggatgggcagagacagctggcgctgagcactgcgcgggccgaggccaggttggggggaggggagagaggtgcatgtagggggtggtatttatagcccaggagcgggggccgaaacccaatccccgctttgggctgggaaataactgtaaagactccagagggagagcggatgtagggctgggctgcaggatggcgcccatcctgcccgggacaaggcgggtcacctctggggcctcaccgcagttccacttcctttctcgggtatttggaaaccgtcaccccgccatttcggtgtgggaagagcgcgcgggccctgccggactttagtgctttaggggttaatttcgggctgacagggacggagcctaaggcagtgagcgccccagtaccctcaaaccttattgctggcccctgctgtctgagcttacaagcattaccgccgctatttccgtgcgggctgacacgggagatgaaagtggtgaagacacccagggtgcgggggtggaggtggggagaggagccagatgggattgatccccagagccagatgggatttaaaggtgagggaggagggcatcctgatggcgtgtggtcagttgatgccagattggatggctgagacacctctgcagcttacaggaaagacagagggaaagggttctatgaattctagctgttcatactcaaagcaaataattaatcaagtggggggggggcctctagctgtaaacccatacctctaggaaaccttttgtcatgtggagccacagtgctcacttgacagattccccactgagaagtgggctaagaggttggcctgcattgctgggtgcctccaggtggggagtcctgtacctgggagcccgggcaggctgctactctcttctcacctctgcccagccccaaccctccactcttgccaactgagtcatcctagctggtagatgatagggtggaagagagactcgcaaggtgaggacttgtggatgtggggctcatgctgtgtcccctctctctatccctcagcgtgaatgcatctcagtccacgtggggcaggcaggtgtccagatgggcaatgcctgctgggagctctattgcttggaacatgggattcagcctgatgggcagatgcccagtgacaagaccattggtggaggggacgactccttcaccaccttcttctgtgaaactggtgctggaaaacacgtaccccgggcagtttttgtggatctggagcctacggtcattggtgagaggaagtggggacaaaattgaagggggtggagcatgactcaaagcttctccctggagagagagggtatttagaccaggcattcctagccctgaaaattcctagccgtacttgaagctgcagaaggcaagctgatctgagactggcctgggcagctggtctgggtttctctcacactctggtatctcaggctggcaggaggatgagtccttccatgcatctggccacagctaccaccctgggggaggaaggtccctgctgagcatagctttgtggtttttgcccttccagatgagatccgaaatggcccataccgacagctcttccacccagagcagctcatcactgggaaagaggatgctgccaacaactatgcccgtggtcactataccattggcaaggagatcattgacccagtgctggatcggatccgcaagctggtgagagtgtgtcttgggagggagggaacttttgagactgtgctaatggtcaggaatattttttttcagatcctttcaggaggtcatctctaactatacatggtctcgagtgtggtgctgctatggcatcctcagtatttgccctgactgctgatgtatcttacgctttatggagccaggtgatagagtccctcaggcccctcccctacctaaactgttctttctcgttcttgcctttcagtctgaccagtgcacaggacttcagggcttcctggtgttccacagctttggtgggggcactggctctggcttcacctcactcctgatggagcggctctctgttgactatggcaagaaatccaagctggaattctccatctacccagccccccaggtgtctacagccgtggtcgagccctacaactctatcctgaccacccacaccaccctggagcactcagactgtgccttcatggtggacaacgaagcaatctatgacatctgccgccgcaacctagacatcgagcgcccaacctacaccaacctcaatcgcctcattagccaaattgtctcctccatcacagcttctctgcgctttgacggggccctcaatgtggacctgacagagttccagaccaacctggtgccctaccctcgcatccacttccccctggccacctatgcaccagtcatctctgcagaaaaggcataccacgagcagctgtcggtggcagagatcaccaatgcctgctttgagcctgccaaccagatggtaaagtgtgatccccggcacggcaagtacatggcctgctgcctgctgtaccgtggagatgtggtgcccaaggatgtcaacgctgccattgccgccatcaagaccaagcgcagcattcagtttgtggactggtgccccacaggcttcaaggttggtatcaactaccagcctcccactgtggtgcctgggggtgacctggccaaggtgcagcgtgccgtgtgcatgctgagcaacacgaccgccatcgccgaggcctgggcccgcctggaccacaagttcgacctgatgtatgccaagagggcgtttgtgcactggtatgtgggtgagggcatggaggagggtgagttctccgaggcccgtgaggatatggctgccctggagaaggattatgaggaggtgggcatcgactcctatgaggacgaggatgagggagaagaataaagcagctgcctggagcctattcactatgtttattgcaaaatcctttcgaaataaacagtttccttgcacggtttcttgttccctctgagtgcttgagcttctgctgccttccccttcatgctgctgctgctctgtttgctgttcatgacccttatcccttccatcgctgaaggtgagacctgcaaaggggttcttgccaggcccaggaagcataaccccagggactttaaattgaagtcctagggttactcagtatagggaggaaatgaggaccaaaatccaggcacaaactgttgaaggatgagtcttcagctcctttccaagtaggagtataatccagtggtttctgtctttgaaagttagactgctaccctgttcttcctgctgcctctacatttaccaactctggaagcaaggcttggcccaggctcctctgtgcattatgagggtttgggagtggggctgggctggcccagagttcctgggcatggagccacgtcataagcttgggggatgggagggaacacaggcgatctcctagagttgtttgtgccactgcacctctgagccagctttgcatagcttcctgtcttgctgctttgctggagctggggctgtgccattaaaagtcaggtcatctcccctctgtttgtgatttctttctggcctcagcctctgtgctagctagtgggagactcctgctagggccctggggaaagcttcaactttgctaacaggagccccaggccccatgctgatgtcatactgtggggtagacatggttcgggggaggaggcttggatcacaaaagagcaggagatgccaaccctgcccttgcctttcctccctggtgattcagggaacagagcccttccctagggaacaggtttgaagcccagctaagacagggcccctgtttactcagcagagtaggcaggaagtggcagctggatactgccacaccacactgcctcattaatcattaaccatgtatgagcttgaacgatcagggagacacaggccaaaacagctgccgctgccacctccactcccctcgcccctaggctgaggatgggagacctgtaatctacctgtctcaaagcttcctcaggtgtctccacccagaggcccttgcctagcaaaccggctaggcagctttgactaagctactcaccccaggagtgaaggaaggaaagaactagttgagtgtttttagggggccctagttcttgacacaggcagatgccagcttgagcccaagcagctttaagttttgatctaagacaagctagaactgtccactgctaaccaacctcctgtagaatgaagtcacaccattgccgactctgcaccattcctccttcccaggcagttcgcctgaaatggcaacctgactttgggccccttgcacctcttctctcactccaggaacactgagactaagatctacaccaacctgcttccactttattcttgtttacacattctcctgctcccagatttggagtcagaacactatgtgagctc

SEQ ID NO: 331 - protein, 111 aa, Homo sapiens; identical to SEQ ID NO: 52

SEQ ID NO: 332 - DNA, 836 bp, Homo sapiens
gtgaaacaccctcggctgggaagtcagttcgttctctcctctcctctcttcttgtttgaacatggtgcggactaaagcagacagtgttccaggcacttacagaaaagtggtggctgctcgagcccccagaaaggtgcttggttcttccacctctgccactaattcgacatcagtttcatcgaggaaagctgaaaataaatatgcaggagggaaccccgtttgcgtgcgcccaactcccaagtggcaaaaaggaattggagaattctttaggttgtcccctaaagattctgaaaaagagaatcagattcctgaagaggcaggaagcagtggcttaggaaaagcaaagagaaaagcatgtcctttgcaacctgatcacacaaatgatgaaaaagaatagaactttctcattcatctttgaataacgtctccttgtttaccctggtattctagaatgtaaatttacataaatgtgtttgttccaattagctttgttgaacaggcatttaattaaaaaatttaggtttaaatttagatgttcaaaagtagttgtgaaatttgagaatttgtaagactaattatggtaacttagcttagtattcaatataatgcattgtttggtttcttttaccaaattaagtgtctagttcttgctaaaatcaagtcattgcattgtgttctaattacaagtatgttgtatttgagatttgcttagattgttgtactgctgccatttttattggtgtttgattattggaatggtgccatattgtcactccttctacttgctttaaaaagcagagttagatttttgcacattaaaaaattcagtattaatt

SEQ ID NO: 333 - protein, 424 aa, Homo sapiens
TDIARQVGEGCRTVPLAGHVGFDSLPDQLVNKSVSQGFCFNILCVGETGLGKSTLMDTLFNTKFEGEPATHTQPGVQLQSNTYDLQESNVRLKLTIVSTVGFGDQINKEDSYKPIVEFIDAQFEAYLQEELKIRRVLHTYHDSRIHVCLYFIAPTGHSLKSLDLVTMKKLDSKVNIIPIIAKADAISKSELTKFKIKITSELVSNGVQIYQFPTDDESVAEINGTMNAHLPFAVIGSTEELKIGNKMMRARQYPWGTVQVENEAHCDFVKLREMLIRVNMEDLREQTHTRHYELYRRCKLEEMGFKDTDPDSKPFSLQETYEAKRNEFLGELQKKEEEMRQMFVQRVKEKEAELKEAEKELHEKFDRLKKLHQDEKKKLEDKKKSLDDEVNAFKQRKTAAELLQSQGSQAGGSQTLKRDKEKKN

SEQ ID NO: 334 - DNA, 4612 bp, Homo sapiens
cgaccgatatagctcgccaggtgggtgaaggttgccgaactgtccccctggctggacatgtggggtttgacagcttgcctgaccagctggtgaataagtccgtcagccagggcttctgcttcaacatcctgtgcgtgggagagacaggtttgggcaagtccaccctcatggacaccctgttcaacaccaaattcgaaggggagccagccacccacacacagccgggtgtccagctccagtctaatacctatgacctccaagagagcaacgtgaggctaaagctcacgatcgttagcacagttggctttggggaccagatcaacaaagaggacagctacaagcctatcgtggaattcatcgatgcacaattcgaggcctacctgcaggaagagctaaagatccgaagagtgctacacacctaccatgactcccgaatccatgtctgcttgtatttcattgcccccacgggtcattccctgaagtctctggacctagtgactatgaagaagctggacagtaaggtgaacatcatccccatcattgccaaagcagatgccatttcgaagagtgagctaacaaagttcaaaatcaaaatcaccagcgagcttgtcagcaacggagtccagatctatcagtttcctacagatgatgagtcggtggcagagatcaatggaaccatgaacgcccacctgccgtttgctgtcattggcagcacagaagaactgaagataggcaacaagatgatgagggcgcggcagtatccttggggcactgtgcaggttgaaaacgaggcccactgcgactttgtgaagctgcgggagatgctgattcgggtcaacatggaggatctgcgggagcagacccacacccggcactatgagctgtatcgccgctgtaagctggaggagatgggcttcaaggacaccgaccctgacagcaaacccttcagtttacaggagacatatgaggccaaaaggaacgagttcctaggggaactccagaaaaaagaagaggagatgagacagatgttcgtccagcgagtcaaagagaaagaagcggagctcaaagaggcagagaaagagctgcacgagaagtttgaccgtctgaagaaactgcaccaggacgagaagaagaaactggaggataagaagaaatccctggatgatgaagtgaatgctttcaagcaaagaaagacggcggctgagctgctccagtcccagggctcccaggctggaggctcacagactctgaagagagacaaagagaagaaaaattaactctgctgtttgctgcatgctgcatgagacccagggtcctgtttgggcttcctgtagacacccttttcctgcgcaacagagctgggcctccctttctctaatttcccccttaacatgcctggggggcatacaatccaacccgcgccctctcctctcttcctgccaaggtttatagaaacctgagaatctgagggtgatgtctggccgctggtcaagaagccaacagtcatgtggctcgcagatgcatcctgcatcccagtccccctcccagcacccccagccatcccccctgtcttcccccacatctttgccagaggtgtgacatggtcagggggcccatctgctactctttcccaccagctcccctgttccagttctggttgctgttagtttccctgaggtatttgcaaccaccatggctgggtaaccaccgatcagcacagctgtccccttggtctcctgtatcccagtcactagtcctccctggtccaccccaccctcatcctcaggagccacagccatttcttagagggtttcaaaaggacagcctttggcgccttttccttctaacctttgagtccagccctttccagttttcattcactcgaagtaactgcactcaagctgtgctcaaaatcggcaacgcatttatttacaccaagcccttcccataaaacacaactgctgaagaaaatagcagacgtttcccctctctctaactctgggtatcccacagatgcaaaagggagaataaacctgaatattattaccagcctagagtcttgaatgatagccttaccgaattcttcttgtgaggtatttcagcatctcggggggtaatttccggaagggctccatactgtcccaataaggtgaggccagtagcaggaataataaatcccactttgtaggctggaaaactgagctgtcaaaagaatcaagtgtttgggggtttgctctgatgagtcttctagttcatttggtgaatgtcatgatgatttttaacatgcattttgcatgcatcccccaataagaagagatgagactcggctggagagaagaaaaggcccttaactttctttccaatttaaggagttgagagtttaaaaatattccagccctaagtttttatcatgggtcccatctgatagtggctttgggaacctctgtgaagtagagagccctcccttgtcagggttatgaggcacagtggcctttggtgtttggccagtgacagtgtgagagatggagttgacctggcaatgatctgtggctaacatgccgtctctctgcccttcctttgcagtaatccatggctgtgtactgaatagtattccccgctacagctggactggactccatttagccttttaagccgaggttcctattttaactgacagctttcctttggggtgccaggcagcgaggccccccacccctatcctgccatgtacttcaagctcacttcttctttttgagttccgcaacttgctcctgcctcccagccccactggcactgaccatgaccacctacttctattttttttttagagtttctttttttgatcacttactttcaaagcacacagtcaaacaaggttatgccaaatttccaggcctttttgaagtattgagaaggggaaggggatttctcacttcaattatagatcataataggaagcaaaaagaaaaaaatgaaaagcaaacatatgcacgcacttttcttgttgacaaagcaagaatataggtttgctgtgtaggtttggtgctctattgattggtgagtgaccagagcaagtatgaaggtgatgctgccaaagcacaagcctttttgaagtattgagaaggggaaggggatttctcacttcaattatagatcataataggaagcaaaaagaaaaaaatgaaaagcaaacatatgcacgcacttttcttgttgacaaagcaagaatataggtttgctgtgtaggtttggtgctctattgattggtgagtgaccagagcaagtatgaaggtgatgctgccaaagcacaagccagtttcttgggaaaattcaagttacagtggagtatttttttgaagaccatatgcttggaggtagaaacaaaccaacgaccaaaaaaaaaaaaaaaaaatctgctcagatactcagccagtagctcagagagatgctgagttaggcctgtcaggtctccttgggaaaggcttcatatttgcaactttgatgattctatgtccagcttcagagctgctttcccagaaattcacgcttaaacaaccaaccggtaaccaccacttccccacaccgccgcccggtaattatttgcattacaaaccggaggcgccctcatttgcatttgtgtacagattaactagttaaggcttgagaagctctgaataattcaaaagtattagacccacacagccttggagagaccttcagaaactaaggaggagttttatattaagggagacattttagtcagtaagacgatataacctacttactccgtaaggggaaatgaaggcccagagaagggaagggacttgaccgaggtcccacttctgtttcgaggcagaagccagactaattttcatgcctcctgactcccaatcagtttcacaaagggattcaatctgtttatatacgttacattcctggatacgaggtcttttgatgttcagagtaactgactagttagtattagaagaccctcgaggtttttttccacagaaaaacatctgaagatggattgggtgagggctggcaaaacgaaggcatgccgggccagctccttaacccaatgacccagtgatgctgcaaggctggaacggggtccaggagactgtgtgtaacaggtgccctaggtgacccttataatcagggaagtttggtgaacaaaaatcgaacccatgagtgaacataaattaaaaagttgatcaacctattaaaatgtgtatttcattgggtagcttttctcactgtagacagattttttccttcttcaatgaaaaggcttttaaattagtacaactgttactatttaaaaaaaaaataccctaagtactctgtttacttctggtgaaacaaaaccagtcattagaaatggtctgtgcttttattttcccagactggagtggcttttctgaaacacacacacacacacacacacacacacacacgtacacacatccctcacttctcttaagccaagaagtttgctttccctagctgcagtgtagatggctcttgtttttgtttttttgttttaatcatttggcattcacatgtggctgttaatatgtgcttgtttttaattaaaacaagaagcttt

SEQ ID NO: 335 - protein, 514 aa, Homo sapiens [sequence omitted]

SEQ ID NO: 336 - DNA, 4064 bp, Homo sapiens
ctgcggccgcctggtttcttgccttaaggagcccattgcctttcccgctgaagtctagatgttgacatgtaataaagcgggcagcaggatggtggtggatgcggccaactccaatgggcctttccagcccgtggtccttctccatattcgagatgttcctcctgctgatcaagagaagctttttatccagaagttacgtcagtgttgcgtcctctttgactttgtttctgatccactaagtgacctaaagtggaaggaagtaaaacgagctgctttaagtgaaatggtagaatatatcacccataatcggaatgtgatcacagagcctatttacccagaagtagtccatatgtttgcagttaacatgtttcgaacattaccaccttcctccaatcctacgggagcggaatttgacccggaggaagatgaaccaacgttagaagcagcctggcctcatctacagcttgtttatgaatttttcttaagatttttagagtctccagatttccaacctaatatagcgaagaaatatattgatcagaagtttgtattgcagcttttagagctctttgacagtgaagatcctcgggagagagattttcttaaaaccacccttcacagaatctatgggaaattcctaggcttgagagcttacatcagaaaacagataaataatatattttataggtttatttatgaaacagagcatcataatggcatagcagagttactggaaatattgggaagtataattaatggatttgccttaccactaaaagaagagcacaagattttcttattgaaggtgttactacctttgcacaaagtgaaatctctgagtgtctaccatccccagctggcatactgtgtagtgcagtttttagaaaaggacagcaccctcacggaaccagtggtgatggcacttctcaaatactggccaaagactcacagtccaaaagaagtaatgttcttaaacgaattagaagagattttagatgtcattgaaccatcagaatttgtgaagatcatggaacccctcttccggcagttggccaaatgtgtctccagcccacacttccaggtggcagagcgagctctctattactggaataatgaatacatcatgagtttaatcagtgacaacgcagcgaagattctgcccatcatgtttccttccttgtaccgcaactcaaagacccattggaacaagacaatacatggcttgatatacaacgccctgaagctcttcatggagatgaaccaaaagctatttgatgactgtacacaacagttcaaagcagagaaactaaaagagaagctaaaaatgaaagaacgggaagaagcatgggttaaaatagaaaatctagccaaagccaatccccagtacacagtgtatagtcaagccagcaccatgagcattccggttgcaatggagacagatgggcctttatttgaagatgtgcagatgctgagaaagacagtgaaggacgaggctcatcaggcacagaaagatccgaagaaggaccgtcctcttgcactccgcaagtccgagctgcctcaggacccccacaccaagaaagccttggaagctcactgcagggccgatgagctggcctcccaggacggccgctagcctccggggcgccgcgtcggggccgggcccgccagttcttttccggattctgtagaaaatacatacttcctgtgccataccaatcagttacactcaaagctttcttggaccccgttccgtaggcaataacgtgcgtccgcctcagcgcgagattaggagttcaaacaatggtgacttcccagagcccgctggcagagccgcgggttgacgacggtgtcctcgcagtgtcgccgccaccccagcgtagtccaagtcagactatttcacaaagtcagagcgataggaaagcaccctgcccttcatcttcatgttctcccaaatggaacttaggatcttttaacataggtggttctgtgataacatcagtgttttccaaatcaaaggaacgctttaaaaaataggacctattttttaagactttacagcctttgaaatggtttccacgtgattgttacgccagcagttcttttgtttgtttttcaatctcagtgaaatggctctttgctttcgagttctcacgcaacgtactgggcaaatgacaatcctcagccgctggtattttctaaggggtctcttcactttgatgagtgacatgaacaccgtgtctccttctcttgtgtgtacctaaagccatatttccaagtctgtggtactccaggattccaggagtaagcctgtagaagagatttattttaaaagagattgctctgaaatttatcttaaaagagcttgctctgtctaccttgacagaaattggagttttaaaattatgtgttaatatttttatttgcagatttcgtttccgtcaacttaaacattgttgcccttcaacaaggctcttgaattaataaaattatagtctctaagaattccacattttatggaaagttagagcaaaatcattttgagttaagccagttcttagcctaatgcaaactgcagcgcctttaagcataaagtaacacaacagcattgcacggggccggcactgccgctgccttcactgaaggctgcagtgctgttctgagagcttggaggaggcaccagcgaggatgacgtttagtggagctctttctgttgaaaagagctcacgttatcaacaccttgtaaggaaaatacagtgtctgagttttcatcggtcttcacatgctgctatatattccacagagttccttgcatgtactgagcttttgttttagatggaatagcacaaggagaaaaatctttaaacttagtgctttgtctattctttatttctctcagggtggccagtattttgacttatttatcctgcttgaaagctacttgagatgtgtactgctattctaaacacgtgatctagtttctttcatctctggcataagattatataacttaatgttaagtgtcttgaggcataaaagacaaaatgtggcttattttaggatctgttttttcatcgaggtctcgggtatcctttcaaagatagtgagaagcagacactgctccttgtgcagctctggtacctcctgcccactgctgtcacttcaagccactggcaatgcttctgtcctcgtgtcttggaggaaaatcacctggggggaggggacttcttgtggtaagagcaagtgcaggtatgaaatgcgaagattgccccagctaaaagtggacaagtccgctttgtgagatgaatacttcctgagaaacttgacaagtatctctccattttaccattatgaaaactatcattaaaaaaaacagtttagatgccttctccttttgagggaaaaagggtgctttttattgtataaagcagcgtcttatgtattttgatataccattgtttgaacttccgtctttagctgatagattctcaaatatccttgattttggatgttcagtatgtttgtgagagaggtttctgggaagactctctttttgccctcgggaaaaagcaaaatatcaatgtttgggtgactgtgtaaagctcagtgtgtaagaacatctttttgtctaggttttctttctgctctttattgaagacaaacactcaccaaaaagaaaaataaaagttttcagagaaactaattttctttggcaagagtattacttaatattttggcctcctaaagtttccctagttagtactcggactcctgtgctaattgtcagcttacatatcattgtatagagactgtttattctgtaccaaactgatttcaaaagtactacattgaaaataaaccggtgactgtttttcttcataaagttctgcgtttggcatcttcactctttccaaaatgtatctgtacatcagaaatgtcactattccaagtgtctttttagtgtggcctttagtatggcttccttttaatattgtacatacattgtatctttgttttatggtaataagtaataaaaatgtagacttcaaaaaaaaaagcggccgcag

SEQ ID NO: 337 - protein, 260 aa, Homo sapiens [sequence omitted]

SEQ ID NO: 338 - DNA, 2460 bp, Homo sapiens
aaagtcaaaccccgacaccgcggcgggccggtgagctcactagctgacccggcaggtcaggatctggcttagcggcgccgcgagctccagtgcgcgcacccgtggccgcctcccagccctctttgccggacgagctctgggccgccacaagactaaggaatggccaccccgcccaagagaagctgcccgtctttctcagccagctctgaggggacccgcatcaagaaaatctccatcgaagggaacatcgctgcagggaagtcaacatttgtgaatatccttaaacaattgtgtgaagattgggaagtggttcctgaacctgttgccagatggtgcaatgttcaaagtactcaagatgaatttgaggaacttacaatgtctcagaaaaatggtgggaatgttcttcagatgatgtatgagaaacctgaacgatggtcttttaccttccaaacatatgcctgtctcagtcgaataagagctcagcttgcctctctgaatggcaagctcaaagatgcagagaaacctgtattattttttgaacgatctgtgtatagtgacaggtatatttttgcatctaatttgtatgaatctgaatgcatgaatgagacagagtggacaatttatcaagactggcatgactggatgaataaccaatttggccaaagccttgaattggatggaatcatttatcttcaagccactccagagacatgcttacatagaatatatttacggggaagaaatgaagagcaaggcattcctcttgaatatttagagaagcttcattataaacatgaaagctggctcctgcataggacactgaaaaccaacttcgattatcttcaagaggtgcctatcttaacactggatgttaatgaagactttaaagacaaatatgaaagtctggttgaaaaggtcaaagagtttttgagtactttgtgatcttgctgaagactacaggcagccaaatggttccagatacttcagctttgtgtatcttcgtaacttcatattaatataagtttctttagaaaacccaagtttttaatcgtttttgttttaaggaaaaaagatttttaaaatgaatcttatgcaaaactttttgatcagtttcttttcttttgttttttttttaaaaaagacatttaaagacaaagacattatttctcatagcaggaaatgtagaggtagatggttccagtatcagcatagtgactaaactacattataaaagatccagcttccttctgtcattcccctcttttgtcttcctcagcaggttggcttttttccctggtgcctctcacttcgttggtgaccagtttcttaaactgaaagctttaatgttacatagtaaatggtagtgtgtcctgtgtaaattagtgtacctattaaaagttgcaaagtggaattaaaggaatccctagaataaggattctgaagttttattttaaattattatcttcttaacagtttagtcccacctcttacttcctgcctcagtctgctttctctactgtctggattaattaggcagcctgctataaagttaaagtcacacatttctattttgcaaacactgtgattactctttgctttgtagtttgctttgctttgtagggttctgcttttaagtttttctctttttcagacaaattactgataaaaatgatattgctctatatgtaatatatcctgaaagcattattttttgttgaataggaaataaaattaatgaagacagaggctagaaagcatccattaattaatgagacacacttaactacttatctctaaaccatctatgtgaatatttgtaaaaataatgaatggactcatcttagttctgtatataaatatattttctttctagtttgtttagttaaggtgtgcagtgtttttcctgtgtattaaacctttccattttacgttttagaaaattttatgtattttaaaataaggggaagagtcattttcacctttaaactactatttttctttccaagtcatttttgtttttggtttcttattcaaagatgataatttagtggattaaccagtccagacgcactgatctttgcaaaggagacttaatttcaaatctgtaattaccatacataaactgtctcattatacgtatgcatttttttagtttgtttttgtttggtataaattaatttgttaattaaatatttcttaagtataaaccttatgaactacagtggagctacactcattgaaatgtaatttcagttctaaaaagatgtaataatcattttagaattaaaatttattctacttttaaataaattatgaatattaaaggtgaaaattgtataaattactttgattccattttaagtggagacatatttcagtgatttttagtaacctttaaaaatgtataatgacttttaaaatttgtagaattgaaaagacgctaataaaaatttattattt

SEQ ID NO: 339 - protein, 177 aa, Homo sapiens
MPVKRSLKLDGLLEENSFDPSKITRKKSVITYSPTTGTCQMSLFASPTSSEEQKHRNGLSNEKRKKLNHPSLTESKESTTKDNDEFMMLLSKVEKLSEEIMEIMQNLSSIQALEGSRELENLIGISCASHFLKREMQKTKELMTKVNKQKLFEKSTGLPHKASRHLDSYEFLKAILN

SEQ ID NO: 340 - DNA, 892 bp, Homo sapiens
cagcggcagtggtgctttcccgaatctcagaatgcctgttaaaagatcactgaagttggatggtctgttagaagaaaattcatttgatccttcaaaaatcacaaggaagaaaagtgttataacttattctccaacaactggaacttgtcaaatgagtctatttgcttctcccacaagttctgaagagcaaaagcacagaaatggactatcaaatgaaaagagaaaaaaattgaatcaccccagtttaactgaaagcaaagaatctacaacaaaagacaatgatgaattcatgatgttgctatcaaaagttgagaaattgtcagaagaaatcatggagataatgcaaaatttaagtagtatacaggctttggagggcagtagagagcttgaaaatctcattggaatctcctgtgcatcacatttcttaaaaagagaaatgcagaaaaccaaagaactaatgacaaaagtgaataaacaaaaactgtttgaaaagagtacaggacttcctcacaaagcatcacgtcatcttgacagctatgaattccttaaagccattttaaactgaggcattaagaagaaatgcactcaccatgagcaccaacttctgcatctgcctgatcatatttaaaggaacagagaaatatttgtaattaatctgcccagtaaataccagctcgtagcagttggcaggtgcatgtctagataaaatttcttgcagctaatttaaactttctacacgcaccagtagataatctcaatgtaaataatacatttcttcttggctctttaatgtaagccaacatggagaggaagatcttgacttatattctgtaccacatacacttctgtggacttttagcatttgtgggtagacttaatggccttcgtggcc

SEQ ID NO: 341 - protein, 1287 aa, Homo sapiens
MEPIYPFARPQMNTRFPSSRMVPFHFPPSKCALWNPTPTGDFIYLHLSYYRNPKLVVTEKTIRLAYRHANENKKNSSCFLLGSLTADEDEEGVTLTVDRFDPGREVPECLEITPTASLPGDFLIPCKVHTQELCSREMIVHSVDDFSSALKALQCHICSKDSLDCGKLLSLRVHITSRESLDSVEFDLHWAAVTLANNFKCTPVKPIPIIPTALARNLSSNLNISQVQGTYKYGYLTMDETRKLLLLLESDPKVYSLPLVGIWLSGITHIYSPQVWACCLRYIFNSSVQERVFSESGNFIIVLYSMTHKEPEFYECFPCDGKIPDFRFQLLTSKETLHLFKNVEPPDKNPIRCELSAESQNAETEFFSKASKNFSIKRSSQKLSSGKMPIHDHDSGVEDEDFSPRPIPSPHPVSQKISKIQPSVPELSLVLDGNFIESNPLPTPLEMVNNENPPLINHLEHLKPLQPQLYDEKHSPEVEAGEPSLRGIPNQLNQDKPALLRHCKVRQPPAYKKGNPHTRNSIKPSSHNGPSHDIFEKLQTVSAGNVQNEEYPIRPSTLNSRQSSLAPQSQPHDFVFSPHNSGRPMELQIPTPPLPSYCSTNVCRCCQHHSHIQYSPLNSWQGANTVGSIQDVQSEALQKHSLFHPSGCPALYCNAFCSSSSPIALRPQGDMGSCSPHSNIEPSPVARPPSHMDLCNPQPCTVCMHTPKTESDNGMMGLSPDAYRFLTEQDRQLRLLQAQIQRLLEAQSLMPCSPKTTAVEDTVQAGRQMELVSVEAQSSPGLHMRKGVSIAVSTGASLFWNAAGEDQEPDSQMKQDDTKISSEDMNFSVDINNEVTSLPGSASSLKAVDIPSFEESNIAVEEEFNQPLSVSNSSLVVRKEPDVPVFFPSGQLAESVSMCLQTGPTGGASNNSETSEEPKIEHVMQPLLHQPSDNQKIYQDLLGQVNHLLNSSSKETEQPSTKAVIISHECTRTQNVYHTKKKTHHSRLVDKDCVLNATLKQLRSLGVKIDSPTKVKKNAHNVDHASVLACISPEAVISGLNCMSFANVGMSGLSPNGVDLSMEANAIALKYLNENQLSQLSVTRSNQNNCDPFSLLHINTDRSTVGLSLISPNNMSFATKKYMKRYGLLQSSDNSEDEEEPPDNADSKSEYLLNQNLRSIPEQLGGQKEPSKNDHEIINCSNCESVGTNADTPVLRNITNEVLQTKAKQQLTEKPAFLVKNLKPSPAVNLRTGKAEFTQHPEKENEGDITIFPESLQPSETLKQMNSMNSVGTFLDVKRLRQLPKLF

SEQ ID NO: 342 - DNA, 5198 bp, Homo sapiens
ctcacttaaacacgtagttcccgcgaccccaacgtcccagaggcggggccggagtcggcggtggcgctccttggagccggctcccgctcctaccctgcaaacagacctcagctccgcggaagttgcgagacggggtttcaccatgttggtcgggctggtctggaaatcctgacttcaggtgatccacccgcctcggcctcccaaaatgctgggattacaagcgtgagccaccgcccctgacatgagccattgacttttaaagcaggagaataatttggatcagatttatatggaaacactcttctagcagcattatggggacttttccataagtctggatactgaggatttggaattaaagaaatcattcaccagacatcatggagcctatatatccttttgcacggccccagatgaataccaggtttccttcaagcaggatggtacctttccactttcctccatcaaaatgtgcactttggaacccaacgccaactggagatttcatctacttacatctcagttactacagaaatccaaagcttgtggtgactgagaagaccatccgacttgcttatcgtcatgctaacgagaataaaaaaaattcgtcatgctttttacttggttctctgacagcagacgaagatgaagaaggtgtaacattgacagtagatcgctttgatcctggtcgagaagtacctgaatgcctagaaataacccctactgcttctcttcctggggactttttgattccatgcaaagttcatactcaagaactttgttcaagagaaatgatagttcacagtgtagatgacttcagttcagctttaaaggctctacagtgccatatatgtagcaaagattccttggactgtggtaagctgctttccctaagagttcatatcacttccagggagagtttggacagtgtggaatttgacttgcattgggcagcagtaactctagcaaataactttaaatgcacacctgtgaagcccatccccattattccaacagctctggcaagaaacttgagcagtaatctgaatatttctcaagttcaagggacttataaatatggatatcttaccatggatgaaacacgcaaattgttacttttgttggaatctgatcccaaggtttattctctaccattggtgggaatttggctgtctggaattacacatatctatagtcctcaggtatgggcttgctgtttgcgatacatattcaattcttctgttcaagaaagggttttttcagaatctggaaatttcatcatagttctctattctatgacacataaggaacctgagttttatgaatgcttcccttgtgatggcaagatacctgactttcggtttcagttgctaaccagtaaggaaacattacatcttttcaaaaatgttgaacctcctgacaaaaatccaatccgttgtgaactgagcgctgaaagccaaaatgcagaaacagagtttttcagtaaggcttccaagaatttttcaattaagaggtcttcccaaaagttatcttctgggaagatgccaatacatgatcacgactctggtgttgaagatgaagatttttctccaagaccaattcctagtcctcatccagtgagtcagaagatttctaagatccaaccatcagttcctgaactttcacttgtgttggatggcaatttcatagaatcaaaccctctgcctactccattggaaatggtgaataatgaaaatcctcctttgattaaccacttggaacacttgaagccattgcaaccccagctttatgatgagaaacacagtccagaagttgaagctggagagccttccttgagaggaataccaaatcagttaaaccaggataaaccagctcttttgagacactgcaaagtaagacagccacctgcctataagaaagggaacccccataccaggaacagtattaaaccatcttctcataatgggccatctcatgatatatttgaaaagctccaaacagtttctgctggaaatgtacaaaacgaagagtatcctataagaccctccacacttaattctaggcagtcttctcttgccccgcagtcccaaccacacgattttgttttttcaccccataattcaggaagaccaatggaacttcagatacctactcccccactgccatcttactgttccacaaacgtttgcaggtgttgtcagcatcatagtcatattcaatatagtccgctaaattcttggcaaggagcaaacacagttggatccattcaagatgtccagtctgaagcccttcaaaagcattcattatttcacccaagtggatgtccagccctgtactgtaatgcattctgttcttcaagtagtcctatagccttgagacctcagggagatatgggcagttgttctccccacagcaatattgaaccatcgcctgtggcaagaccgccttcacatatggacttatgtaacccacagccttgcacagtgtgcatgcacacacccaagactgagtcagataatggaatgatgggactatctccagatgcatatcggttcctcacagaacaagacagacagctaagactacttcaggcacagattcagcgtttgttggaagcacagtctctgatgccctgttcccctaagacaactgctgttgaagacacagtgcaagctggaagacaaatggagttggtttctgtggaagcacagtcttcccctggcttgcacatgagaaaaggtgtaagcattgctgtgagcacaggtgctagcttgttttggaatgcagcaggtgaggatcaagagcctgactctcaaatgaagcaagatgataccaaaatttccagtgaggacatgaatttttctgtcgatattaataatgaagtcacaagtcttccaggtagtgcatcttcattaaaagcagttgatattcccagttttgaagagagcaacattgctgtggaagaagaatttaaccagccactttctgtatccaactcttctctagttgtgagaaaagaacctgatgtacctgtgttctttccaagtggccagctggcagaaagtgtaagcatgtgtttacagactggaccaacagggggtgccagtaacaattctgaaacatcagaggaaccaaaaattgagcatgtaatgcaacccttgcttcatcaaccatcagataaccagaaaatttaccaggatttattgggtcaagtaaaccacctattaaatagttcctccaaggaaactgagcagccgtctaccaaagcagtaattatcagtcatgaatgcaccagaacccaaaacgtttaccatacaaagaaaaaaacacatcattcaagactggtggacaaagattgtgtccttaatgcaactcttaagcaactaagaagccttggagtaaaaattgattctcccactaaagtgaagaaaaatgcacataacgtggatcacgccagtgtgttggcatgcatcagcccagaagcagtgatctctggattaaactgcatgtcatttgctaatgttggcatgagcggcttaagccccaatggtgtggatttgagcatggaggcaaatgctatagctctgaaatatttaaatgaaaatcagctgtcacaactgtctgtcactcgatcgaaccaaaataattgtgacccattcagccttctccatattaatacagacagaagcacagtggggcttagtttaatttcaccaaacaacatgtcatttgcaaccaaaaaatatatgaagagatatggactcctacaaagcagtgacaatagtgaagatgaagaggaacctcccgacaatgcagatagcaagagtgaatatttattgaatcagaaccttaggtccatacccgaacagcttggtggtcagaaagagccttctaagaatgaccatgaaataattaattgttctaactgtgaatctgtggggaccaacgcagatacgccagtattgagaaatattacaaatgaagttttgcagacaaaagcaaaacagcagttgactgaaaagccagctttcttagtaaagaaccttaaaccaagtcctgcagtgaaccttcgaaccgggaaagcagagttcactcaacatcctgagaaagaaaatgaaggggacattacaatttttcctgaaagtttgcaaccttctgaaacgctaaagcagatgaatagcatgaattcagtaggcaccttcttagatgtaaaacgtctcagacagttaccaaaattattttaaccttttaactccctgcccttttaatacagggacagggtgtctcctgaagatacttagggaaaacaggagcctaccacaaggctcctgatcattctggagtcactgtttcttggtagcagccaattgggaagagtgacttctgtgagatggctggctggtgataggactaagttctcattgttcaaatagagctgttcaacatcactgaaacctttaagaaaagccctgagatcagttattcctacaagtttaagtagtagacagatactatccagctctaagtctcaactgctcttttatactgtacttttttttttgagacggagttttgctcttgtagcccaggctggagtgcaatggcaggatctcagatcactgcaacctctgcctcctgggttcaagcgattttcctgcttcatcttcccaggtagctgggattacaggcatgtgccacaacgcctggctaattttgtatttttagtagagactggtttctccatgttggtcaggctggtctcaaactcccgacctcaggtgatccgcccgcctcggcctcctaaagtgctgggattacaggcgtgagccactgcccagctatactgtatatttaagaaggtccagcatgttgcatctctgcattatcctatatcataaaagaagcataagttatcatggtgttgggtaaattagcgaaatcaaccgcttcctaagtttaagggaaaagttatttttaaaaacaacttaataaaaacttacactcttatacaagagtgtatttccccttaattaggatgcatgttgattaaactcgagatacagctttttgcagtatggtgggttggttttggtgtaacatcttcaacatgtcacactggctatcaaagaataagaaaattattgagtatgagtgtgttttataaactttctgagtttttcagatgtcttaatattttt

SEQ ID NO: 343 - protein, 1085 aa, Homo sapiens
EIEQNSAMAPRKRGGRGISFIFCCFRNNDHPEITYRLRNDSNFALQTMEPALPMPPVEELDVMFSELVDELDLTDKHREAMFALPAEKKWQIYCSKKKDQEENKGATSWPEFYIDQLNSMAARKSLLALEKEEEEERSKTIESLKTALRTKPMRFVTRFIDLDGLSCILNFLKTMDYETSESRIHTSLIGCIKALMNNSQGRAHVLAHSESINVIAQSLSTENIKTKVAVLEILGAVCLVPGGHKKVLQAMLHYQKYASERTRFQTLINDLDKSTGRYRDEVSLKTAIMSFINAVLSQGAGVESLDFRLHLRYEFLMLGIQPVIDKLREHENSTLDRHLDFFEMLRNEDELEFAKRFELVHIDTKSATQMFELTRKRLTHSEAYPHFMSILHHCLQMPYKRSGNTVQYWLLLDRIIQQIVIQNDKGQDPDSTPLENFNIKNVVRMLVNENEVKQWKEQAEKMRKEHNELQQKLEKKERECDAKTQEKEEMMQTLNKMKEKLEKETTEHKQVKQQVADLTAQLHELSRRAVCASIPGGPSPGAPGGPFPSSVPGSLLPPPPPPPLPGGMLPPPPPPLPPGGPPPPPGPPPLGAIMPPPGAPMGLALKKKSIPQPTNALKSFNWSKLPENKLEGTVWTEIDDTKVFKILDLEDLERTFSAYQRQQDFFVNSNSKQKEADAIDDTLSSKLKVKELSVIDGRRAQNCNILLSRLKLSNDEIKRAILTMDEQEDLPKDMLEQLLKFVPEKSDIDLLEEHKHELDRMAKADRFLFEMSRINHYQQRLQSLYFKKKFAERVAEVKPKVEAIRSGSEEVFRSGALKQLLEVVLAFGNYMNKGQRGNAYGFKISSLNKIADTKSSIDKNITLLHYLITIVENKYPSVLNLNEELRDIPQAAKVNMTELDKEISTLRSGLKAVETELEYQKSQPPQPGDKFVSVVSQFITVASFSFSDVEDLLAEAKDLFTKAVKHFGEEAGKIQPDEFFGIFDQFLQAVSEAKQENENMRKKKEEEERRARMEAQLKEQRERERKMRKAKENSEESGEFDDLVSALRSGEVFDKDLSKLKRNRKRITNQMTDSSRERPITKLNF

SEQ ID NO: 344 - DNA, 4153 bp, Homo sapiens
aagaaatagaacagaattcagccatggccccaagaaagagaggtggacgaggtatttcattcatcttttgctgtttccgaaataatgatcacccagaaatcacgtatcggctgcgaaatgatagcaactttgcgcttcagaccatggaaccagcattgcccatgccccctgtggaggagctggatgtcatgttcagtgaactggtggatgaactggacctcacagacaaacacagagaagccatgtttgcacttccagctgagaaaaaatggcaaatatactgtagcaagaaaaaggaccaggaagaaaacaagggagctacaagttggcctgaattctacattgatcagctcaattccatggctgctagaaaatctctgctggctttagagaaggaagaagaagaagaaagaagtaaaactatagagagtttaaagacagcactgaggacaaaaccaatgaggtttgtaaccagattcatcgacttggatggcctatcatgtatcctcaactttctaaagaccatggactacgagacctcagagtctcgaatacatacttctctcattggctgtataaaggcgttaatgaacaactctcaaggccgggctcacgtcctggctcattctgagagtattaatgtaattgctcagagtctgagcacagagaacattaaaacgaaggtggccgtgctggaaatcttgggcgccgtgtgcctggttcccgggggccacaagaaggttctgcaggccatgctgcactaccagaagtatgccagcgaaaggacccgctttcagacattaattaacgacttggataaaagcactgggcggtatcgagatgaagtgagtctcaagactgccatcatgtccttcattaatgcagtgctcagccaaggtgcaggagtggagagtttggactttagacttcatcttcgctatgaatttctgatgttaggaattcaacctgtaatagataaattaagggaacacgaaaattcaacattagataggcatttagacttttttgaaatgctccgaaatgaagatgaactagaatttgccaaaagatttgaactggttcacatagacacaaaaagtgcaactcagatgtttgagctgaccaggaagaggctgacacatagtgaagcttacccgcatttcatgtccatcctgcaccactgcctccaaatgccttacaagaggagtggcaacactgttcagtactggctactactagatagaattatacagcagatagttatccagaatgacaaaggacaggaccctgactccacacctttggaaaactttaatattaagaatgtcgtacgaatgttggttaatgaaaatgaagttaagcagtggaaagaacaagcggaaaaaatgagaaaagagcacaatgagctacaacagaaactggaaaagaaagaacgagaatgtgatgctaagactcaagagaaggaagagatgatgcagaccttaaataaaatgaaagagaaacttgaaaaggagactactgagcataagcaagtcaagcagcaggtggcggacctcacagcacagctccatgagctcagcaggagggccgtctgtgcttcaatcccaggtggaccctcgcctggagcaccaggagggccctttccttcctctgtgcctggatctctccttcctcccccaccacccccacctctaccaggtgggatgcttccccctccaccgcctcccctccctccaggtggccctcctcctcccccagggcctcctcccttaggggcaatcatgccacctcctggtgctccaatgggcctagcactgaagaagaaaagcattcctcagcccacaaatgccctgaaatccttcaactggtctaaactgcccgagaacaaactggaaggaacagtatggaccgaaattgatgatacaaaagtcttcaaaattctagatcttgaagacctggaaagaaccttctctgcctatcaaagacagcaggatttctttgtgaacagtaactccaagcagaaagaagcagatgccattgatgacactctgagttccaaacttaaagttaaagagctttcggtgattgatggtcggagagctcagaattgcaacatccttctatcgaggttgaaattatccaatgacgaaatcaaacgggcaattctaacaatggacgaacaggaagatctgcccaaggacatgttggaacagctcttgaaatttgttcctgaaaaaagtgacattgacctattggaggaacataaacacgaactggatcggatggccaaggctgataggttcctttttgagatgagccgaattaatcactatcagcaaaggttgcaatcgctgtacttcaaaaagaagtttgcagagcgtgtggcagaagtgaaacctaaagtggaagcaattcgttctggctcagaagaggtgtttaggagtggtgccctcaagcagttgctggaggtggttttggcatttggaaattatatgaataaaggtcaaagagggaatgcatatggattcaagatatctagcctaaacaaaattgctgacacaaaatccagcatcgacaaaaacattacccttttgcactatctcatcactattgtggaaaataagtaccccagtgttctcaatctaaatgaagaattgcgagatattcctcaagctgcgaaagtaaacatgactgagctggacaaagaaataagtaccttgagaagtggcttgaaagcagtagagacagagctggaatatcagaagtctcagcccccacagcccggagataagtttgtgtctgttgtcagccagttcatcacagtagccagcttcagcttctctgatgttgaagaccttctagcagaagctaaagacctgtttactaaagcagtgaagcactttggggaagaggctggcaaaatacaaccagatgagttctttggcatttttgatcaatttcttcaagctgtgtcagaagccaaacaagaaaacgaaaatatgagaaagaaaaaggaggaagaagaacgtcgagctcgcatggaagctcagctcaaagaacaacgtgaaagggaacgtaaaatgagaaaagctaaagagaatagtgaagaaagcggagagtttgatgaccttgtttcagctttacgctcaggagaagtgtttgacaaagacctttctaaattgaaacggaatcgcaaacgtattaccaaccagatgactgacagcagcagagagagaccaatcacaaaacttaatttctaattttccatgaatacttttttttagaaagctcattagcagccctctaaagtgactagaacgtttcattacactgccttgcaatccaaacagtggcaattttttccttcatctgtgagtgaatgtgtgaacgtgtgtatgtaaatgtatgtgtgtatatattaaaaaatgtatatagatgtctgagtgttgtctggagacctatacgtatggttaaaaagatttatgttaatgtatgtgctccaaaacctttcgtgtatgcattcacattgagtgtggctcattttctttccccgaacgccatgactgttcagaagcacaatactatctcctgaaagagataagagacattccctagattcaaaggcaaaacagaagaaacaaacaaacaaacaaacaaagcttgcaaaatattttatggtttccaagcttgatatcctttaaaattattttcattgatggaactggagttgttggaaaaacatagatttaaaatgatttttgatagctgacattgtgatgttgatgtatcacatcagtaataggaccagctttgaatttctgacattggtgtggggatacagtctgtaaatgtttattgagaacatcttgcacacaatttgaattatgtagaatgtcaatcaagtttttgtatatttaaaagttggacatcaattttttcccctgatttcatcaagttatctctgccaagtgctcttgataatttcttcagatttttggaaaaaaacactatataaatgcaatccatgcttttttaaagaacaacattgccagagtatgcttgttctaacaatatagatatataaaccttaaaaataataaaatatctcacccaagacttaaaggaagaattctctgaagggataaagattact

SEQ ID NO: 345 - protein, 713 aa, Homo sapiens
LACFLDKHHDIIIIDHRNPRQLDAEALCRSIRSSKLSENTVIVGVVRRVDREELSVMPFISAGFTRRYVENPNIMACYNELLQLEFGEVRSQLKLRACNSVFTALENSEDAIEITSEDRFIQYANPAFETTMGYQSGELIGKELGEVPINEKKADLLDTINSCIRIGKEWQGIYYAKKKNGDNIQQNVKIIPVIGQGGKIRHYVSIIRVCNGNNKAEKISECVQSDTRTDNQTGKHKDRRKGSLDVKAVASRATEVSSQRRHSSMARIHSMTIEAPITKVINVINAAQESSPMPVTEALDRVLEILRTTELYSPQFGAKDDDPHANDLVGGLMSDGLRRLSGNEYVLSTKNTQMVSSNIITPISLDDVPPRIARAMENEEYWDFDIFELEAATHNRPLIYLGLKMFARFGICEFLHCSESTLRSWLQIIEANYHSSNPYHNSTHSADVLHATAYFLSKERIKETLDPIDEVAALIAATIHDVDHPGRTNSFLCNAGSELAILYNDTAVLESHHAALAFQLTTGDDKCNIFKNMERNDYRTLRQGIIDMVLATEMTKHFEHVNKFVNSINKPLATLEENGETDKNQEVINTMLRTPENRTLIKRMLIKCADVSNPCRPLQYCIEWAARISEEYFSQTDEEKQQGLPVVMPVFDRNTCSIPKSQISFIDYFITDMFDAWDAFVDLPDLMQHLDNNFKYWKGLDEMKLRNLRPPPE

SEQ ID NO: 346 - DNA, 3396 bp, Homo sapiens
cttgcctgtttcctggacaaacatcatgacattatcatcatagaccacagaaatcctcgacagctggatgcagaggcactgtgcaggtctatcagatcatcaaaactctcagaaaacacagttattgttggtgtagtacgcagggtggatagagaagagttgtccgtaatgcctttcatttctgctggatttacaaggaggtatgtagaaaaccccaacatcatggcctgctacaatgaactgctccagctggagtttggagaggtgcgatcacaactgaaactcagggcttgtaactcagtattcactgcattagaaaacagtgaagatgcaattgaaattacaagcgaagaccgttttatacagtatgcaaatcctgcatttgaaacaacaatgggctatcagtcaggtgaattaatagggaaggagttaggagaagtgcctataaatgaaaaaaaggctgacttgctcgatactataaattcatgcatcaggataggcaaggagtggcaaggaatttactatgccaaaaagaaaaacggagataatatacaacaaaatgtgaagataatacctgtcattggacagggaggaaaaattagacactatgtgtccattatcagagtgtgcaatggcaacaataaggctgagaaaatatccgaatgtgttcagtctgacactcgtacagataatcagacaggcaaacataaagacaggagaaaaggctcactagacgtcaaagctgttgcctcccgtgcaactgaagtttccagccagagacgacactcttccatggcccggatacattccatgacaattgaggcgcccatcaccaaggtaatcaatgttatcaatgctgcccaggaaagtagtcccatgcctgtgacagaagccctagaccgtgtgctggaaattctaagaaccactgagttatattcaccacagtttggtgctaaagatgatgatccccatgccaatgaccttgttgggggcttaatgtctgatggtttgcgaagactatcagggaatgaatatgttctttcaacaaaaaacactcaaatggtttcaagcaatataatcactcccatctcccttgatgatgtcccaccacggatagctcgggccatggaaaatgaggaatactgggactttgatatttttgaactggaggctgccacccacaataggcctttgatttatcttggtctcaaaatgtttgctcgctttggaatctgtgaattcttacactgctccgagtcaacgctaagatcatggttacaaattatcgaagccaattatcattcctccaatccctaccacaattctacacattctgctgatgtgcttcatgccactgcctattttctctccaaggagaggataaaggaaactttagatccaattgatgaggtcgctgcactcatcgcagccaccattcatgatgtggatcaccctgggagaaccaactccttcctgtgtaatgctggaagtgagctggccattttgtacaatgacactgctgtgctggagagccaccatgcggccttggccttccagctgaccactggagatgataaatgcaatatatttaaaaacatggagaggaatgattatcggacactgcgccaggggattatcgacatggtcttagccacagaaatgacaaagcactttgagcatgtcaacaaatttgtcaacagcatcaacaaacccttggcaacactagaagaaaatggggaaactgataaaaaccaggaagtgataaacactatgcttaggactccagagaaccggaccctaatcaaacgaatgctgattaaatgtgctgatgtgtccaatccctgccgacccctgcagtactgcatcgagtgggctgcacgcatttcggaagaatatttttctcagactgatgaagagaagcagcagggcttacctgtggtgatgccagtgtttgacagaaatacctgcagcatccccaaatcccaaatctctttcattgattacttcatcacagacatgtttgatgcttgggatgcctttgtagacctgcctgatttaatgcagcatcttgacaacaactttaaatactggaaaggactggacgaaatgaagctgcggaacctccgaccacctcctgaatagtgggagacaccacccagagccctgaagctttgttccttcggtcatttggaattcctgagggcagccagagctccttggtcctttcagtactaggcagaacagcccccgatctgcatagcctgtgaaagcccacggggacatcagtaaccttctgcagccaccatccaatgccattactgtcaagtgagacttggccactgtagcctgggcctgctgcaggagctcttcagaaaggcacatgaggaccacggtttgcctcagtttctggtaaaacacaaggtctggagtgcccctgcaaagggtattgatggacttcctgccagtgacagagcatgtctattgcaaacaattctctcagttacgttcagcacttaagaacggctaatggcaataggatctttagcaactttttcacatcatagaaggtgcaatcgctcacttgggaacactactgagagtgacttctcttttaaaattgagtagcagatgaaaaattaaaatttgaacttgattattaatatcaattaaaatgttttatttattttattaaaagctcaatattttctatgaattcaaaaatacttcagagccaaagccaacttcaaataccgtgaccaaatttacatgattcatattcattatgcattacttggtatacagacttattttcataatgcaaattaataaaatgacacttttactgcactatagaaatattcatgtatgttaaacttttctgattgaggctaactggaaaaagctggggtcgtattctaagtgctaaagaaggctgcttctactgtatagaacccagggctctgaaacagctctagccgcctaatgcacttcacaggtaactccccaaggtaaaactagactctcttgttggttcgcaaagaaaagttaggacttaacacttttttctaaaattttataattcaatttccaaaagtctactctattttatactgtttctacaaaatattccttataaaaacaaagaacaaaaattgaatatttaatgaattgacattttataaccaacctgtttttatctacggtgggaatctttgatgccagaaatttataaagaggttctgtatcttcacaccttgaataagcataataccataaaaaatgacacttgacatgtcaatgtatttgtcatttcattttaaactcgtatttgtggtttttttcccagataaaaatgaaattaaaccatttctttttaagaaaaaaaaaaaaaaaaaa

SEQ ID NO: 347 - protein, 1050 aa, Homo sapiens
MAAVKKEGGALSEAMSLEGDEWELSKENVQPLRQGRIMSTLQGALAQESACNNTLQQQKRAFEYEIRFYTGNDPLDVWDRYISWTEQNYPQGGKESNMSTLLERAVEALQGEKRYYSDPRFLNLWLKLGRLCNEPLDMYSYLHNQGIGVSLAQFYISWAEEYEARENFRKADAIFQEGIQQKAEPLERLQSQHRQFQARVSRQTLLALEKEEEEEVFESSVPQRSTLAELKSKGKKTARAPIIRVGGALKAPSQNRGLQNPFPQQMQNNSRITVFDENADEASTAELSKPTVQPWIAPPMPRAKENELQAGPWNTGRSLEHRPRGNTASLIAVPAVLPSFTPYVEETAQQPVMTPCKIEPSINHILSTRKPGKEEGDSLQRVQSHQQASEEKKEKMMYCKEKIYAGVGEFSFEEIRAEVFRKKLKEQREAELLTSAEKRAEMQKQIEEMEKKLKEIQTTQQERTGDQQEETMPTKETTKLQIASESQKIPGMTLSSSVCQVNCCARETSLAENIWQEQPHSKGPSVPFSIFDEFLLSEKKNKSPPADPPRVLAQRRPLAVLKTSESITSNEDVSPDVCDEFTGIEPLSEDAIITGFRNVTICPNPEDTCDFARAARFVSTPFHEIMSLKDLPSDPERLLPEEDLDVKTSEDQQTACGTIYSQTLSIKKLSPIIEDSREATHSSGFSGSSASVASTSSIKCLQIPEKLELTNETSENPTQSPWCSQYRRQLLKSLPELSASAELCIEDRPMPKLEIEKEIELGNEDYCIKREYLICEDYKLFWVAPRNSAELTVIKVSSQPVPWDFYINLKLKERLNEDFDHFCSCYQYQDGCIVWHQYINCFTLQDLLQHSEYITHEITVLIIYNLLTIVEMLHKAEIVHGDLSPRCLILRNRIHDPYDCNKNNQALKIVDFSYSVDLRVQLDVFTLSGFRTVQILEGQKILANCSSPYQVDLFGIADLAHLLLFKEHLQVFWDGSFWKLSQNISELKDGELWNKFFVRILNANDEATVSVLGELAAEMNGVFDTTFQSHLNKALWKVGKLTSPGALLFQ

SEQ ID NO: 348 - DNA, 3702 bp, Homo sapiens
gtttgttagggagtcgtgtgcgtgccttggtcgcttctgtagctccgagggcaggttgcggaagaaagcccaggcggtctgtggcccagaggaaaggcctgcagcaggacgaggacctgagccaggaatgcaggatggcggcggtgaagaaggaagggggtgctctgagtgaagccatgtccctggagggagatgaatgggaactgagtaaagaaaatgtacaacctttaaggcaagggcggatcatgtccacgcttcagggagcactggcacaagaatctgcctgtaacaatactcttcagcagcagaaacgggcatttgaatatgaaattcgattttacactggaaatgaccctctggatgtttgggataggtatatcagctggacagagcagaactatcctcaaggtgggaaggagagtaatatgtcaacgttattagaaagagctgtagaagcactacaaggagaaaaacgatattatagtgatcctcgatttctcaatctctggcttaaattagggcgtttatgcaatgagcctttggatatgtacagttacttgcacaaccaagggattggtgtttcacttgctcagttctatatctcatgggcagaagaatatgaagctagagaaaactttaggaaagcagatgcgatatttcaggaagggattcaacagaaggctgaaccactagaaagactacagtcccagcaccgacaattccaagctcgagtgtctcggcaaactctgttggcacttgagaaagaagaagaggaggaagtttttgagtcttctgtaccacaacgaagcacactagctgaactaaagagcaaagggaaaaagacagcaagagctccaatcatccgtgtaggaggtgctctcaaggctccaagccagaacagaggactccaaaatccatttcctcaacagatgcaaaataatagtagaattactgtttttgatgaaaatgctgatgaggcttctacagcagagttgtctaagcctacagtccagccatggatagcaccccccatgcccagggccaaagagaatgagctgcaagcaggcccttggaacacaggcaggtccttggaacacaggcctcgtggcaatacagcttcactgatagctgtacccgctgtgcttcccagtttcactccatatgtggaagagactgcacaacagccagttatgacaccatgtaaaattgaacctagtataaaccacatcctaagcaccagaaagcctggaaaggaagaaggagattctctacaaagggttcagagccatcagcaagcgtctgaggagaagaaagagaagatgatgtattgtaaggagaagatttatgcaggagtaggggaattctcctttgaagaaattcgggctgaagttttccggaagaaattaaaagagcaaagggaagccgagctattgaccagtgcagagaagagagcagaaatgcagaaacagattgaagagatggagaagaagctaaaagaaatccaaactactcagcaagaaagaacaggtgatcagcaagaagagacgatgcctacaaaggagacaactaaactgcaaattgcttccgagtctcagaaaataccaggaatgactctatccagttctgtttgtcaagtaaactgttgtgccagagaaacttcacttgcggagaacatttggcaggaacaacctcattctaaaggtcccagtgtacctttctccatttttgatgagtttcttctttcagaaaagaagaataaaagtcctcctgcagatcccccacgagttttagctcaacgaagaccccttgcagttctcaaaacctcagaaagcatcacctcaaatgaagatgtgtctccagatgtttgtgatgaatttacaggaattgaacccttgagcgaggatgccattatcacaggcttcagaaatgtaacaatttgtcctaacccagaagacacttgtgactttgccagagcagctcgttttgtatccactccttttcatgagataatgtccttgaaggatctcccttctgatcctgagagactgttaccggaagaagatctagatgtaaagacctctgaggaccagcagacagcttgtggcactatctacagtcagactctcagcatcaagaagctgagcccaattattgaagacagtcgtgaagccacacactcctctggcttctctggttcttctgcctcggttgcaagcacctcctccatcaaatgtcttcaaattcctgagaaactagaacttactaatgagacttcagaaaaccctactcagtcaccatggtgttcacagtatcgcagacagctactgaagtccctaccagagttaagtgcctctgcagagttgtgtatagaagacagaccaatgcctaagttggaaattgagaaggaaattgaattaggtaatgaggattactgcattaaacgagaatacctaatatgtgaagattacaagttattctgggtggcgccaagaaactctgcagaattaacagtaataaaggtatcttctcaacctgtcccatgggacttttatatcaacctcaagttaaaggaacgtttaaatgaagattttgatcatttttgcagctgttatcaatatcaagatggctgtattgtttggcaccaatatataaactgcttcacccttcaggatcttctccaacacagtgaatatattacccatgaaataacagtgttgattatttataaccttttgacaatagtggagatgctacacaaagcagaaatagtccatggtgacttgagtccaaggtgtctgattctcagaaacagaatccacgatccctatgattgtaacaagaacaatcaagctttgaagatagtggacttttcctacagtgttgaccttagggtgcagctggatgtttttaccctcagcggctttcggactgtacagatcctggaaggacaaaagatcctggctaactgttcttctccctaccaggtagacctgtttggtatagcagatttagcacatttactattgttcaaggaacacctacaggtcttctgggatgggtccttctggaaacttagccaaaatatttctgagctaaaagatggtgaattgtggaataaattctttgtgcggattctgaatgccaatgatgaggccacagtgtctgttcttggggagcttgcagcagaaatgaatggggtttttgacactacattccaaagtcacctgaacaaagccttatggaaggtagggaagttaactagtcctggggctttgctctttcagtgagctaggcaatcaagtctcacagattgctgcctcagagcaatggttgtattgtggaacactgaaactgtatgtgctgtaatttaatttaggacacatttagatgcactaccattgctgttctactttttggtacaggtatattttgacgtcactgatattttttatacagtgatatacttactcatggccttgtctaacttttgtgaagaactattttattctaaacagactcattacaaatggttaccttgttatttaacccatttgtctctacttttccctgtacttttcccatttgtaatttgtaaaatgttctcttatgatcaccatgtattttgtaaataataaaatagtatctgttaaaaaaaaaaaaaaaaaaaaaaaaaaaaaaaaaaaaaaaaaaaaaaaaaaaaaa

SEQ ID NO: 349 - protein, 733 aa, Homo sapiens
MDLSMKKFAVRRFFSVYLRRKSRSKSSSLSRLEEEGVVKEIDISHHVKEGFEKADPSQFELLKVLGQGSYGKVFLVRKVKGSDAGQLYAMKVLKKATLKVRDRVRSKMERDILAEVNHPFIVKLHYAFQTEGKLYLILDFLRGGDLFTRLSKEVMFTEEDVKFYLAELALALDHLHSLGIIYRDLKPENILLDEEGHIKITDFGLSKEAIDHDKRAYSFCGTIEYMAPEVVNRRGHTQSADWWSFGVLMFEMLTGSLPFQGKDRKETMALILKAKLGMPQFLSGEAQSLLRALFKRNPCNRLGAGIDGVEEIKRHPFFVTIDWNTLYRKEIKPPFKPAVGRPEDTFHFDPEFTARTPTDSPGVPPSANAHHLFRGFSFVASSLIQEPSQQDLHKVPVHPIVQQLHGNNIHFTDGYEIKEDIGVGSYSVCKRCVHKATDTEYAVKIIDKSKRDPSEEIEILLRYGQHPNIITLKDVYDDGKFVYLVMELMRGGELLDRILRQRYFSEREASDVLCTITKTMDYLHSQGVVHRDLKPSNILYRDESGSPESIRVCDFGFAKQLRAGNGLLMTPCYTANFVAPEVLKRQGYDAACDIWSLGILLYTMLAGFTPFANGPDDTPEEILARIGSGKYALSGGNWDSISDAAKDVVSKMLHVDPHQRLTAMQVLKHPWVVNREYLSPNQLSRQDVHLVKGAMAATYFALNRTPQAPRLEPVLSSNLAQRRGMKRLTSTRL

SEQ ID NO: 350 - DNA, 3982 bp, Homo sapiens
ggcacgaggcggagaaggaggcggagggagcgattgtggccccggccgcggtggccggcgcggcctgccctttgtgaccgcagctcgcgccccacgccccgcgcccatggccgccgtgccgggctccctggccacgcgtgcccgcccgcggacctgagccccgcgcctgggatgccggggatgcgcgtcccccggccctgcggctgctccgggctgggcgcggggcgatggacctgagcatgaagaagttcgccgtgcgcaggttcttctctgtgtacctgcgcaggaagtcgcgctccaagagctccagcctgagccggctcgaggaagaaggtgtcgtgaaggagatagacatcagccatcatgtgaaggagggctttgagaaggcagatccttcccagtttgagctgctgaaggttttaggacaaggatcctatggaaaggtgttcctggtgaggaaggtgaaggggtccgacgctgggcagctctacgccatgaaggtccttaagaaagccaccctaaaagttcgggaccgagtgagatcgaagatggagagagacatcttggcagaagtgaatcaccccttcattgtgaagcttcattatgcctttcagacggaaggaaagctctacctgatcctggacttcctgcggggaggggacctcttcacccggctctccaaagaggtcatgttcacggaggaggatgtcaagttctacctggctgagctggccttggctttagaccatctccacagcctggggatcatctacagagatctgaagcctgagaacatcctcctggatgaagaggggcacattaagatcacagatttcggcctgagtaaggaggccattgaccacgacaagagagcgtactccttctgcgggacgatcgagtacatggcgcccgaggtggtgaaccggcgaggacacacgcagagtgccgactggtggtccttcggcgtgctcatgtttgagatgctcacggggtccctgccgttccaggggaaggacaggaaggagaccatggctctcatcctcaaagccaagctggggatgccgcagttcctcagtggggaggcacagagtttgctgcgagctctcttcaaacggaacccctgcaaccggctgggtgctggcattgacggagtggaggaaattaagcgccatcccttctttgtgaccatagactggaacacgctgtaccggaaggagatcaagccaccgttcaaaccagcagtgggcaggcctgaggacaccttccactttgaccccgagttcacagcgcggacgcccacagactctcctggcgtccccccgagtgcaaacgctcatcacctgtttagaggattcagctttgtggcctcaagcctgatccaggagccctcacagcaagatctgcacaaagtcccagttcacccaatcgtgcagcagttacacgggaacaacatccacttcaccgatggctacgagatcaaggaggacatcggggtgggctcctactcagtgtgcaagcgatgtgtgcataaagccacagacaccgagtatgccgtgaagatcattgataagagcaagagagacccctcggaagagattgagatcctcctgcggtacggccagcacccgaacatcatcaccctcaaggatgtctatgatgatggcaagtttgtgtacctggtaatggagctgatgcgtggtggggagctcctggaccgcatcctccggcagagatacttctcggagcgcgaagccagtgacgtcctgtgcaccatcaccaagaccatggactacctccattcccagggggttgttcatcgagacctgaagccgagtaacatcctgtacagggatgagtcggggagcccagaatccatccgagtctgcgacttcggctttgccaagcagctgcgcgcggggaacgggctgctcatgacaccctgctacacggccaatttcgtggccccggaggtcctgaagcgtcaaggctatgatgcggcgtgtgacatctggagtttggggatcctgttgtacaccatgctggcaggatttaccccttttgcaaatgggccagacgatacccctgaggagattctggcgcggatcggcagtgggaagtatgccctttctgggggaaactgggactcgatatctgacgcagctaaagacgtcgtgtccaagatgctccacgtggaccctcatcagcgcctgacggcgatgcaagtgctcaaacacccgtgggtggtcaacagagagtacctgtccccaaaccagctcagccgacaggacgtgcacctggtgaagggcgcgatggccgccacctactttgctctaaacagaacacctcaggccccgcggctggagcccgtgctgtcgtccaacctggctcagcgcagaggcatgaagagactcacgtccacgcggttgtagcgggtgggaccctggccccagcgtcccctgccagcatcctcgtgggctcacagaccccggcctcggagcccgtctggcacccagagtgaccacaagtccagcagggaggcggcgcccgccctcgccgtgtccgtgttttctttttcagccccggagagggtcctgacctgggggcttctccaagcctcactgcgccagcctccccgcccgctctcttttctcccaagcaaaaccaaatgcgccccttcacctcgcgtgcccgtgcgaggccgggggcttctttcagagcccgcgggtcctctcatacatggcttctgtttctgccgagagatctgttttccaattatgaagccggtcggtttggtcagactcccgacacccacgtcccaggtacccggtgggaaagtggcagtgcgagggcgcagccattggtggttgcagggccccagagggctggggtgacctggcatcccggggctccccacgggctggatgacggggttggcactgtggcgtccaggaggagatgcctggttctgcccaaaataatccaaagagccgtttcctcctcgcccttcagtttttgcctgaggtgctgggtagcccatcctttcctctgtcccagattcaaatgaggagtaagagcccagacgagaggaaggcaggctggatctttgccttgagagctccgtgtcaccaggatggaagggggtgcctctcggaggagcctgtgtccacctccagtctcggctttccccggggggccaagcgcactgggctgccgtctgtccccagctcccgtggccacacagctatctggaggctttgcagggagtcgtgggttctcgcacctgctcagccctgtgtcggcttcctgtgtgctcacctaaagctgtggttttgctgtgttcacttcgatttttctggtctgtggagaaactgtgaattggagaaatggagctctgtggcttcccacccaaaccttctcagtccagctggaggctggagggagacacaggccccacccagcagactgaggggcagaggcacaggtgggagggcagcggagatcagcgtggacaggagcgatgcactttgtagatgctgtggctttgtgttgcgttttgtgtctctgttgcacagatctgttttttcacactgatccgtattcccctgggtgtgcacacagggcgggtgtggggcatttaggccatgctgtgctctacttcattgagtaaaatcgagtgagaggttccgggcagcaggatcgacgcccagtccagccggcagagggaacacacgggtccttcattgtcctgtaagggtgttgaagatgctccctggcggcccccaagcagactagatgggaggaggcgccgctcagcccctcaccctgcatcactgaagagcggcgcctctgcagcaagcagggcttcaggaggtgcccgctggccacagccaggttttccctaagaagatgttattttgttgggttttgttccccctccatctcgattctcgtacccaactaaaaaaaaaaaaaaaaaaaaaaa

SEQ ID NO: 351 - protein, 700 aa, Homo sapiens
MEPLCPLLLVGFSLPLARALRGNETTADSNETTTTSGPPDPGASQPLLAWLLLPLLLLLLVLLLAAYFFRFRKQRKAVVSTSDKKMPNGILEEQEQQRVMLLSRSPSGPKKYFPIPVEHLEEEIRIRSADDCKQFREEFNSLPSGHIQGTFELANKEENREKNRYPNILPNDHSRVILSQLDGIPCSDYINASYIDGYKEKNKFIAAQGPKQETVNDFWRMVWEQKSATIVMLTNLKERKEEKCHQYWPDQGCWTYGNIRVCVEDCVVLVDYTIRKFCIQPQLPDGCKAPRLVSQLHFTSWPDFGVPFTPIGMLKFLKKVKTLNPVHAGPIVVHCSAGVGRTGTFIVIDAMMAMMHAEQKVDVFEFVSRIRNQRPQMVQTDMQYTFIYQALLEYYLYGDTELDVSSLEKHLQTMHGTTTHFDKIGLEEEFRKLTNVRIMKENMRTGNLPANMKKARVIQIIPYDFNRVILSMKRGQEYTDYINASFIDGYRQKDYFIATQGPLAHTVEDFWRMIWEWKSHTIVMLTEVQEREQDKCYQYWPTEGSVTHGEITIEIKNDTLSEAISIRDFLVTLNQPQARQEEQVRVVRQFHFHGWPEIGIPAEGKGMIDLIAAVQKQQQQTGNHPITVHCSAGAGRTGTFIALSNILERVKAEGLLDVFQAVKSLRLQRPHMVQTLEQYEFCYKVVQDFIDIFSDYANFK

SEQ ID NO: 352 - DNA, 2654 bp, Homo sapiens
agccggagctggagccgaggcggcggcgggacgcggccggccggacaaatttcctgctaggctgcggacgagcgggcggcaggagccggcgcgagcggcttcaggaacccacggcctctgcgcgtccccgcgacccttcttcgcgcccggcgaagacagccgggcgccccggagggcggcgggcaggcgcccgggagatgcggagcctccgctgcagcgcgatctgcgcgaccagaccggcccccccgagactatagccttcactttccctcggtccaccatggagcccttgtgtccactcctgctggtgggttttagcttgccgctcgccagggctctcaggggcaacgagaccactgccgacagcaacgagacaaccacgacctcaggccctccggacccgggcgcctcccagccgctgctggcctggctgctactgccgctgctgctcctcctcctcgtgctccttctcgccgcctacttcttcaggttcaggaagcagaggaaagctgtggtcagcaccagcgacaagaagatgcccaacggaatcttggaggagcaagagcagcaaagggtgatgctgctcagcaggtcaccctcagggcccaagaagtattttcccatccccgtggagcacctggaggaggagatccgtatcagatccgccgacgactgcaagcagtttcgggaggagttcaactcattgccatctggacacatacaaggaacttttgaactggcaaataaagaagaaaacagagaaaaaaacagatatcccaacatccttcccaatgaccattctagggtgattctgagccaactggatggaattccctgttcagactacatcaatgcttcctacatagatggttacaaagagaagaataaattcatagcagctcaaggtcccaaacaggaaacggttaacgacttctggagaatggtctgggagcaaaagtctgcgaccatcgtcatgttaacaaacttgaaagaaaggaaagaggaaaagtgccatcagtactggcccgaccaaggctgctggacctatggaaacatccgggtgtgcgtggaggactgcgtggttttggtcgactacaccatccggaagttctgcatacagccacagctccccgacggctgcaaagcccccaggctggtctcacagctgcacttcaccagctggcccgacttcggagtgccttttacccccattgggatgctgaagttcctcaagaaagtaaagacgctcaaccccgtgcacgctgggcccatcgtggtccactgtagcgcgggcgtgggccggacgggcaccttcattgtgatcgatgccatgatggccatgatgcacgcggagcagaaggtggatgtgtttgaatttgtgtctcgaatccgtaatcagcgccctcagatggttcaaacggatatgcagtacacgttcatctaccaagccttactcgagtactacctctacggggacacagagctggacgtgtcctccctggagaagcacctgcagaccatgcacggcaccaccacccacttcgacaagatcgggctggaggaggagttcaggaaattgacaaatgtccggatcatgaaggagaacatgaggacgggcaacttgccggcaaacatgaagaaggccagggtcatccagatcatcccgtatgacttcaaccgagtgatcctttccatgaaaaggggtcaagaatacacagactacatcaacgcatccttcatagacggctaccgacagaaggactatttcatcgccacccaggggccactggcacacacggttgaggacttctggaggatgatctgggaatggaaatcccacactatcgtgatgctgacggaggtgcaggagagagagcaggataaatgctaccagtattggccaaccgagggctcagttactcatggagaaataacgattgagataaagaatgataccctttcagaagccatcagtatacgagactttctggtcactctcaatcagccccaggcccgccaggaggagcaggtccgagtagtgcgccagtttcacttccacggctggcctgagatcgggattcccgccgagggcaaaggcatgattgacctcatcgcagccgtgcagaagcagcagcagcagacaggcaaccaccccatcaccgtgcactgcagtgccggagctgggcgaacaggtacattcatagccctcagcaacattttggagcgagtaaaagccgagggacttttagatgtatttcaagctgtgaagagtttacgacttcagagaccacatatggtgcaaaccctggaacagtatgaattctgctacaaagtggtacaagattttattgatatattttctgattatgctaatttcaaatgaagattcctgccttaaaatattttttaatttaatggtcagtatattttgtaaaaatcatgttaatttatttcatagttgacattaatatcttccctaatttctttgtatatattttgttatgccttaaaggccacctgctatacagttgttaaatcttaaatatgctttttaaaaattggaataatgtattaaggtcaaataatatcccataaaatatatatttctgctaatattagtaaatatcttaatttttaaaaaaaaaaaaaaaaaa

SEQ ID NO: 353 - protein, 512 aa, Homo sapiens
MGCIKSKGKDSLSDDGVDLKTQPVRNTERTIYVRDPTSNKQQRPVPESQLLPGQRFQTKDPEEQGDIVVALYPYDGIHPDDLSFKKGEKMKVLEEHGEWWKAKSLLTKKEGFIPSNYVAKLNTLETEEWFFKDITRKDAERQLLAPGNSAGAFLIRESETLKGSFSLSVRDFDPVHGDVIKHYKIRSLDNGGYYISPRITFPCISDMIKHYQKQADGLCRRLEKACISPKPQKPWDKDAWEIPRESIKLVKRLGAGQFGEVWMGYYNNSTKVAVKTLKPGTMSVQAFLEEANLMKTLQHDKLVRLYAVVTREEPIYIITEYMAKGSLLDFLKSDEGGKVLLPKLIDFSAQIAEGMAYIERKNYIHRDLRAANVLVSESLMCKIADFGLARVIEDNEYTAREGAKFPIKWTAPEAINFGCFTIKSDVWSFGILLYEIVTYGKIPYPGRTNADVMTALSQGYRMPRVENCPDELYDIMKMCWKEKAEERPTFDYLQSVLDDFYTATEGQYQQQP

SEQ ID NO: 354 - DNA, 2298 bp, Homo sapiens
tcggccgagcccagagacagccagttcctctcccgccgcgccgggccgcgtgccgctcgctccccggccgtggcgcctccgggccagacgcgctgcagcctccagcccgcggcaagcgggcggggcggccgcgccacccccggccccgcgccagcagcccctcgccgcgcgtccagcgttcccggccagcagcctccccatacgcagtcctgctggaccgccccgtcgcgccccccactctgaactcaagtcaccgtggagctccgccgccccgaaactttcacgcgagcgggaaatatgggatgtataaaatcaaaagggaaagacagcttgagtgacgatggagtagatttgaagactcaaccagtacgtaatactgaaagaactatttatgtgagagatccaacgtccaataaacagcaaaggccagttccagaatctcagcttttacctggacagaggtttcaaactaaagatccagaggaacaaggagacattgtggtagccttgtacccctatgatggcatccacccggacgacttgtctttcaagaaaggagagaagatgaaagtcctggaggagcatggagaatggtggaaagcaaagtcccttttaacaaaaaaagaaggcttcatccccagcaactatgtggccaaactcaacaccttagaaacagaagagtggtttttcaaggatataaccaggaaggacgcagaaaggcagcttttggcaccaggaaatagcgctggagctttccttattagagaaagtgaaacattaaaaggaagcttctctctgtctgtcagagactttgaccctgtgcatggtgatgttattaagcactacaaaattagaagtctggataatgggggctattacatctctccacgaatcacttttccctgtatcagcgacatgattaaacattaccaaaagcaggcagatggcttgtgcagaagattggagaaggcttgtattagtcccaagccacagaagccatgggataaagatgcctgggagatcccccgggagtccatcaagttggtgaaaaggcttggcgctgggcagtttggggaagtctggatgggttactataacaacagtaccaaggtggctgtgaaaaccctgaagccaggaactatgtctgtgcaagccttcctggaagaagccaacctcatgaagaccctgcagcatgacaagctcgtgaggctctacgctgtggtcaccagggaggagcccatttacatcatcaccgagtacatggccaagggcagtttgctggatttcctgaagagcgatgaaggtggcaaagtgctgcttccaaagctcattgacttttctgctcagattgcagagggaatggcatacatcgagcggaagaactacattcaccgggacctgcgagcagctaatgttctggtctccgagtcactaatgtgcaaaattgcagattttggccttgctagagtaattgaagataatgagtacacagcaagggaaggtgctaagttccctattaagtggacggctccagaagcaatcaactttggatgtttcactattaagtctgatgtgtggtcctttggaatcctcctatacgaaattgtcacctatgggaaaattccctacccagggagaactaatgccgacgtgatgaccgccctgtcccagggctacaggatgccccgtgtggagaactgcccagatgagctctatgacattatgaaaatgtgctggaaagaaaaggcagaagagagaccaacgtttgactacttacagagcgtcctggatgatttctacacagccacggaagggcaataccagcagcagccttagagcacagggagacccgtccatttggcaggggtggctgcctcatttagagaggaaaagtaaccatcactggttgcacttatgatttcatgtgcggggatcatctgccgtgcctggatcctgaaatagaggctaaattactcaggaagaacaccctctaaatgggaaagtattctgtactcttagatggattctccactcagttgcaacttggacttgtcctcagcagctggtaatcttgctctgcttgacaacatctgagtgcagccgtttgagaagaaaacatctattctctccaaaaatgcacccaactagctctatgtttacaaatggacataggactcaaagtttcagagaccattgcaatgaatccccaataattgcagaactaaactcatttataaagctaaaataaccggatatatacatagcatgacatttctttgtgctttggcttacttgttt

SEQ ID NO: 355 - protein, 372 aa, Homo sapiens
MHFSTVTRDMEAFTASSLSSLGAAGGFPGAASPGADPYGPREPPPPPPRYDPCAAAAPGAPGPPPPPHAYPFAPAAGAATSAAAEPEGPGASCAAAAKAPVKKNAKVAGVSVQLEMKALWDEFNQLGTEMIVTKAGRRMFPTFQVKLFGMDPMADYMLLMDFVPVDDKRYRYAFHSSSWLVAGKADPATPGRVHYHPDSPAKGAQWMKQIVSFDKLKLTNNLLDDNGHIILNSMHRYQPRFHVVYVDPRKDSEKYAEENFKTFVFEETRFTAVTAYQNHRITQLKIASNPFAKGFRDCDPEDWPRNHRPGALPLMSAFARSRNPVASPTQPSGTEKGLVTEGSGLQPGLLDVLLKPPSKKSESLRPPHCKDT

SEQ ID NO: 356 - DNA, 1538 bp, Homo sapiens
ccggcagggggagcgaggaggaagggaaccgcggccgggccagcggaggcggcggagcgcaccgcccaccagggctcagggtcctccgaccgggtgaagcttcgctggctgccaggatccccggcagggatgcacttcagcaccgtcaccagggacatggaagccttcacggccagcagcctgagcagcctgggggccgcggggggcttcccgggcgccgcgtcgcccggcgccgacccgtacggcccgcgcgagcccccgccgccgccgccgcgctacgacccgtgcgccgccgccgcccccggcgccccgggcccgccgccgccgccgcacgcctacccgtttgcgccggccgccggggccgccaccagcgccgccgccgagcccgagggccccggggccagctgcgcggccgcagccaaggcgccggtgaagaagaacgcgaaggtggccggtgtgagcgtgcagctagagatgaaggcgctgtgggacgagttcaaccagctgggcaccgagatgatcgtcaccaaggccggcaggcggatgtttcccaccttccaagtgaagctcttcggcatggatcccatggccgactatatgctgctcatggacttcgtgccggtggacgataagcgctaccggtacgccttccacagctcctcctggctggtggcggggaaggccgaccctgccacgccaggccgcgtgcactaccacccggactcgcctgccaagggcgcgcagtggatgaagcaaatcgtgtccttcgacaagctcaagctgaccaacaacctactggacgacaacggccacattattctgaattccatgcacagataccagccccgcttccacgtggtctatgtggacccacgcaaagatagcgagaaatatgccgaggagaacttcaaaacctttgtgttcgaggagacacgattcaccgcggtcactgcctaccagaaccatcggatcacgcagctcaagattgccagcaatcccttcgcgaaaggcttccgggactgtgaccctgaggactggccccggaaccaccggcccggcgcactgccgctcatgagcgccttcgcgcgctcgcggaaccccgtggcttccccgacgcagcccagcggcacggagaaagggctggtcacagaaggctctgggctccaacctggcttgctggacgtgctcttgaagcccccaagtaagaagtctgagtccctgagaccaccacactgcaaggacacttgaaggtactcaggtttcagagcccaagtcaggaggtcaagtgtgcatgcaagaggtggcaggggacagatgtgctgctgttcccaggccacctgcacagctggatggtggaagcagttcacttaaaggccatgagttactcgggaggctgaggcaggaggatcacttgagcctattagttggaggctgcagtaagctatgatcatgccactgcactccagcctgggtgacagagtgagacccccactgtccctggtctcttaaaagaaaaaacaaacaaacaaaccaaaaaa

SEQ ID NO: 357 - protein, 3256 aa, Homo sapiens
MWPTRRLVTIKRSGVDGPHFPLSLSTCLFGRGIECDIRIQLPVVSKQHCKIEIHEQEAILHNFSSTNPTQVNGSVIDEPVRLKHGDVITIIDRSFRYENESLQNGRKSTEFPRKIREQEPARRVSRSSFSSDPDEKAQDSKAYSKITEGKVSGNPQVHIKNVKEDSTADDSKDSVAQGTTNVHSSEHAGRNGRNAADPISGDFKEISSVKLVSRYGELKSVPTTQCLDNSKKNESPFWKLYESVKKELDVKSQKENVLQYCRKSGLQTDYATEKESADGLQGETQLLVSRKSRPKSGGSGHAVAEPASPEQELDQNKGKGRDVESVQTPSKAVGASFPLYEPAKMKTPVQYSQQQNSPQKHKNKDLYTTGRRESVNLGKSEGFKAGDKTLTPRKLSTRNRTPAKVEDAADSATKPENLSSKTRGSIPTDVEVLPTETEIHNEPFLTLWLTQVERKIQKDSLSKPEKLGTTAGQMCSGLPGLSSVDINNFGDSINESEGIPLKRRRVSFGGHLRPELFDENLPPNTPLKRGEAPTKRKSLVMHTPPVLKKIIKEQPQPSGKQESGSEIHVEVKAQSLVISPPAPSPRKTPVASDQRRRSCKTAPASSSKSQTEVPKRGGERVATCLQKRVSISRSQHDILQMICSKRRSGASEANLIVAKSWADVVKLGAKQTQTKVIKHGPQRSMNKRQRRPATPKKPVGEVHSQFSTGHANSPCTIIIGKAHTEKVHVPARPYRVLNNFISNQKMDFKEDLSGIAEMFKTPVKEQPQLTSTCHIAISNSENLLGKQFQGTDSGEEPLLPTSESFGGNVFFSAQNAAKQPSDKCSASPPLRRQCIRENGNVAKTPRNTYKMTSLETKTSDTETEPSKTVSTVNRSGRSTEFRNIQKLPVESKSEETNTEIVECILKRGQKATLLQQRREGEMKEIERPFETYKENIELKENDEKMKAMKRSRTWGQKCAPMSDLTDLKSLPDTELMKDTARGQNLLQTQDHAKAPKSEKGKITKMPCQSLQPEPINTPTHTKQQLKASLGKVGVKEELLAVGKFTRTSGETTHTHREPAGDGKSIRTFKESPKQILDPAARVTGMKKWPRTPKEEAQSLEDLAGFKELFQTPGPSEESMTDEKTTKIACKSPPPESVDTPTSTKQWPKRSLRKADVEEEFLALRKLTPSAGKAMLTPKPAGGDEKDIKAFMGTPVQKLDLAGTLPGSKRQLQTPKEKAQALEDLAGFKELFQTPGHTEELVAAGKTTKIPCDSPQSDPVDTPTSTKQRPKRSIRKADVEGELLACRNLMPSAGKAMHTPKPSVGEEKDIIIFVGTPVQKLDLTENLTGSKRRPQTPKEEAQALEDLTGFKELFQTPGHTEEAVAAGKTTKMPCESSPPESADTPTSTRRQPKTPLEKRDVQKELSALKKLTQTSGETTHTDKVPGGEDKSINAFRETAKQKLDPAASVTGSKRHPKTKEKAQPLEDLAGWKELFQTPVCTDKPTTHEKTTKIACRSQPDPVDTPTSSKPQSKRSLRKVDVEEEFFALRKRTPSAGKAMHTPKPAVSGEKNIYAFMGTPVQKLDLTENLTGSKRRLQTPKEKAQALEDLAGFKELFQTRGHTEESMTNDKTAKVACKSSQPDLDKNPASSKRRLKTSLGKVGVKEELLAVGKLTQTSGETTHTHTEPTGDGKSMKAFMESPKQILDSAASLTGSKRQLRTPKGKSEVPEDLAGFIELFQTPSHTKESMTNEKTTKVSYRASQPDLVDTPTSSKPQPKRSLRKADTEEEFLAFRKQTPSAGKAMHTPKPAVGEEKDINTFLGTPVQKLDQPGNLPGSNRRLQTRKEKAQALEELTGFRELFQTPCTDNPTADEKTTKKILCKSPQSDPADTPTNTKQRPKRSLKKADVEEEFLAFRKLTPSAGKAMHTPKAAVGEEKDINTFVGTPVEKLDLLGNLPGSKRRPQTPKEKAKALEDLAGFKELFQTPGHTEESMTDDKITEVSCKSPQPDPVKTPTSSKQRLKISLGKVGVKEEVLPVGKLTQTSGKTTQTHRETAGDGKSIKAFKESAKQMLDPANYGTGMERWPRTPKEEAQSLEDLAGFKELFQTPDHTEESTTDDKTTKIACKSPPPESMDTPTSTRRRPKTPLGKRDIVEELSALKQLTQTTHTDKVPGDEDKGINVFRETAKQKLDPAASVTGSKRQPRTPKGKAQPLEDLAGLKELFQTPVCTDKPTTHEKTTKIACRSPQPDPVGTPTIFKPQSKRSLRKADVEEESLALRKRTPSVGKAMDTPKPAGGDEKDMKAFMGTPVQKLDLPGNLPGSKRWPQTPKEKAQALEDLAGFKELFQTPGTDKPTTDEKTTKIACKSPQPDPVDTPASTKQRPKRNLRKADVEEEFLALRKRTPSAGKAMDTPKPAVSDEKNINTFVETPVQKLDLLGNLPGSKRQPQTPKEKAEALEDLVGFKELFQTPGHTEESMTDDKITEVSCKSPQPESFKTSRSSKQRLKIPLVKVDMKEEPLAVSKLTRTSGETTQTHTEPTGDSKSIKAFKESPKQILDPAASVTGSRRQLRTRKEKARALEDLVDFKELFSAPGHTEESMTIDKNTKIPCKSPPPELTDTATSTKRCPKTRPRKEVKEELSAVERLTQTSGQSTHTHKEPASGDEGIKVLKQRAKKKPNPVEEEPSRRRPRAPKEKAQPLEDLAGFTELSETSGHTQESLTAGKATKIPCESPPLEVVDTTASTKRHLRTRVQKVQVKEEPSAVKFTQTSGETTDADKEPAGEDKGIKALKESAKQTPAPAASVTGSRRRPRAPRESAQAIEDLAGFKDPAAGHTEESMTDDKTTKIPCKSSPELEDTATSSKRRPRTRAQKVEVKEELLAVGKLTQTSGETTHTDKEPVGEGKGTKAFKQPAKRNVDAEDVIGSRRQPRAPKEKAQPLEDLASFQELSQTPGHTEELANGAADSFTSAPKQTPDSGKPLKISRRVLRAPKVEPVGDVVSTRDPVKSQSKSNTSLPPLPFKRGGGKDGSVTGTKRLRCMPAPEEIVEELPASKKQRVAPRARGKSSEPVVIMKRSLRTSAKRIEPAEELNSNDMKTNKEEHKLQDSVPENKGISLRSRRQDKTEAEQQITEVFVLAERIEINRNEKKPMKTSPEMDIQNPDDGARKPIPRDKVTENKRCLRSARQNESSQPKVAEESGGQKSAKVLMQNQKGKGEAGNSDSMCLRSRKTKSQPAASTLESKSVQRVTRSVKRCAENPKKAEDNVCVKKITTRSHRDSEDI

SEQ ID NO: 358 - DNA, 12515 bp, Homo sapiens
ctaccgggcggaggtgagcgcggcgccggctcctcctgcggcggactttgggtgcgacttgacgagcggtggttcgacaagtggccttgcgggccggatcgtcccagtggaagagttgtaaatttgcttctggccttcccctacggattatacctggccttcccctacggattatactcaacttactgtttagaaaatgtggcccacgagacgcctggttactatcaaaaggagcggggtcgacggtccccactttcccctgagcctcagcacctgcttgtttggaaggggtattgaatgtgacatccgtatccagcttcctgttgtgtcaaaacaacattgcaaaattgaaatccatgagcaggaggcaatattacataatttcagttccacaaatccaacacaagtaaatgggtctgttattgatgagcctgtacggctaaaacatggagatgtaataactattattgatcgttccttcaggtatgaaaatgaaagtcttcagaatggaaggaagtcaactgaatttccaagaaaaatacgtgaacaggagccagcacgtcgtgtctcaagatctagcttctcttctgaccctgatgagaaagctcaagattccaaggcctattcaaaaatcactgaaggaaaagtttcaggaaatcctcaggtacatatcaagaatgtcaaagaagacagtaccgcagatgactcaaaagacagtgttgctcagggaacaactaatgttcattcctcagaacatgctggacgtaatggcagaaatgcagctgatcccatttctggggattttaaagaaatttccagcgttaaattagtgagccgttatggagaattgaagtctgttcccactacacaatgtcttgacaatagcaaaaaaaatgaatctcccttttggaagctttatgagtcagtgaagaaagagttggatgtaaaatcacaaaaagaaaatgtcctacagtattgtagaaaatctggattacaaactgattacgcaacagagaaagaaagtgctgatggtttacagggggagacccaactgttggtctcgcgtaagtcaagaccaaaatctggtgggagcggccacgctgtggcagagcctgcttcacctgaacaagagcttgaccagaacaaggggaagggaagagacgtggagtctgttcagactcccagcaaggctgtgggcgccagctttcctctctatgagccggctaaaatgaagacccctgtacaatattcacagcaacaaaattctccacaaaaacataagaacaaagacctgtatactactggtagaagagaatctgtgaatctgggtaaaagtgaaggcttcaaggctggtgataaaactcttactcccaggaagctttcaactagaaatcgaacaccagctaaagttgaagatgcagctgactctgccactaagccagaaaatctctcttccaaaaccagaggaagtattcctacagatgtggaagttctgcctacggaaactgaaattcacaatgagccatttttaactctgtggctcactcaagttgagaggaagatccaaaaggattccctcagcaagcctgagaaattgggcactacagctggacagatgtgctctgggttacctggtcttagttcagttgatatcaacaactttggtgattccattaatgagagtgagggaatacctttgaaaagaaggcgtgtgtcctttggtgggcacctaagacctgaactatttgatgaaaacttgcctcctaatacgcctctcaaaaggggagaagccccaaccaaaagaaagtctctggtaatgcacactccacctgtcctgaagaaaatcatcaaggaacagcctcaaccatcaggaaaacaagagtcaggttcagaaatccatgtggaagtgaaggcacaaagcttggttataagccctccagctcctagtcctaggaaaactccagttgccagtgatcaacgccgtaggtcctgcaaaacagcccctgcttccagcagcaaatctcagacagaggttcctaagagaggaggagaaagagtggcaacctgccttcaaaagagagtgtctatcagccgaagtcaacatgatattttacagatgatatgttccaaaagaagaagtggtgcttcggaagcaaatctgattgttgcaaaatcatgggcagatgtagtaaaacttggtgcaaaacaaacacaaactaaagtcataaaacatggtcctcaaaggtcaatgaacaaaaggcaaagaagacctgctactccaaagaagcctgtgggcgaagttcacagtcaatttagtacaggccacgcaaactctccttgtaccataataatagggaaagctcatactgaaaaagtacatgtgcctgctcgaccctacagagtgctcaacaacttcatttccaaccaaaaaatggactttaaggaagatctttcaggaatagctgaaatgttcaagaccccagtgaaggagcaaccgcagttgacaagcacatgtcacatcgctatttcaaattcagagaatttgcttggaaaacagtttcaaggaactgattcaggagaagaacctctgctccccacctcagagagttttggaggaaatgtgttcttcagtgcacagaatgcagcaaaacagccatctgataaatgctctgcaagccctcccttaagacggcagtgtattagagaaaatggaaacgtagcaaaaacgcccaggaacacctacaaaatgacttctctggagacaaaaacttcagatactgagacagagccttcaaaaacagtatccactgtaaacaggtcaggaaggtctacagagttcaggaatatacagaagctacctgtggaaagtaagagtgaagaaacaaatacagaaattgttgagtgcatcctaaaaagaggtcagaaggcaacactactacaacaaaggagagaaggagagatgaaggaaatagaaagaccttttgagacatataaggaaaatattgaattaaaagaaaacgatgaaaagatgaaagcaatgaagagatcaagaacttgggggcagaaatgtgcaccaatgtctgacctgacagacctcaagagcttgcctgatacagaactcatgaaagacacggcacgtggccagaatctcctccaaacccaagatcatgccaaggcaccaaagagtgagaaaggcaaaatcactaaaatgccctgccagtcattacaaccagaaccaataaacaccccaacacacacaaaacaacagttgaaggcatccctggggaaagtaggtgtgaaagaagagctcctagcagtcggcaagttcacacggacgtcaggggagaccacgcacacgcacagagagccagcaggagatggcaagagcatcagaacgtttaaggagtctccaaagcagatcctggacccagcagcccgtgtaactggaatgaagaagtggccaagaacgcctaaggaagaggcccagtcactagaagacctggctggcttcaaagagctcttccagacaccaggtccctctgaggaatcaatgactgatgagaaaactaccaaaatagcctgcaaatctccaccaccagaatcagtggacactccaacaagcacaaagcaatggcctaagagaagtctcaggaaagcagatgtagaggaagaattcttagcactcaggaaactaacaccatcagcagggaaagccatgcttacgcccaaaccagcaggaggtgatgagaaagacattaaagcatttatgggaactccagtgcagaaactggacctggcaggaactttacctggcagcaaaagacagctacagactcctaaggaaaaggcccaggctctagaagacctggctggctttaaagagctcttccagactcctggtcacaccgaggaattagtggctgctggtaaaaccactaaaataccctgcgactctccacagtcagacccagtggacaccccaacaagcacaaagcaacgacccaagagaagtatcaggaaagcagatgtagagggagaactcttagcgtgcaggaatctaatgccatcagcaggcaaagccatgcacacgcctaaaccatcagtaggtgaagagaaagacatcatcatatttgtgggaactccagtgcagaaactggacctgacagagaacttaaccggcagcaagagacggccacaaactcctaaggaagaggcccaggctctggaagacctgactggctttaaagagctcttccagacccctggtcatactgaagaagcagtggctgctggcaaaactactaaaatgccctgcgaatcttctccaccagaatcagcagacaccccaacaagcacaagaaggcagcccaagacacctttggagaaaagggacgtacagaaggagctctcagccctgaagaagctcacacagacatcaggggaaaccacacacacagataaagtaccaggaggtgaggataaaagcatcaacgcgtttagggaaactgcaaaacagaaactggacccagcagcaagtgtaactggtagcaagaggcacccaaaaactaaggaaaaggcccaacccctagaagacctggctggctggaaagagctcttccagacaccagtatgcactgacaagcccacgactcacgagaaaactaccaaaatagcctgcagatcacaaccagacccagtggacacaccaacaagctccaagccacagtccaagagaagtctcaggaaagtggacgtagaagaagaattcttcgcactcaggaaacgaacaccatcagcaggcaaagccatgcacacacccaaaccagcagtaagtggtgagaaaaacatctacgcatttatgggaactccagtgcagaaactggacctgacagagaacttaactggcagcaagagacggctacaaactcctaaggaaaaggcccaggctctagaagacctggctggctttaaagagctcttccagacacgaggtcacactgaggaatcaatgactaacgataaaactgccaaagtagcctgcaaatcttcacaaccagacctagacaaaaacccagcaagctccaagcgacggctcaagacatccctggggaaagtgggcgtgaaagaagagctcctagcagttggcaagctcacacagacatcaggagagactacacacacacacacagagccaacaggagatggtaagagcatgaaagcatttatggagtctccaaagcagatcttagactcagcagcaagtctaactggcagcaagaggcagctgagaactcctaagggaaagtctgaagtccctgaagacctggccggcttcatcgagctcttccagacaccaagtcacactaaggaatcaatgactaatgaaaaaactaccaaagtatcctacagagcttcacagccagacctagtggacaccccaacaagctccaagccacagcccaagagaagtctcaggaaagcagacactgaagaagaatttttagcatttaggaaacaaacgccatcagcaggcaaagccatgcacacacccaaaccagcagtaggtgaagagaaagacatcaacacgtttttgggaactccagtgcagaaactggaccagccaggaaatttacctggcagcaatagacggctacaaactcgtaaggaaaaggcccaggctctagaagaactgactggcttcagagagcttttccagacaccatgcactgataaccccacagctgatgagaaaactaccaaaaaaatactctgcaaatctccgcaatcagacccagcggacaccccaacaaacacaaagcaacggcccaagagaagcctcaagaaagcagacgtagaggaagaatttttagcattcaggaaactaacaccatcagcaggcaaagccatgcacacgcctaaagcagcagtaggtgaagagaaagacatcaacacatttgtggggactccagtggagaaactggacctgctaggaaatttacctggcagcaagagacggccacaaactcctaaagaaaaggccaaggctctagaagatctggctggcttcaaagagctcttccagacaccaggtcacactgaggaatcaatgaccgatgacaaaatcacagaagtatcctgcaaatctccacaaccagacccagtcaaaaccccaacaagctccaagcaacgactcaagatatccttggggaaagtaggtgtgaaagaagaggtcctaccagtcggcaagctcacacagacgtcagggaagaccacacagacacacagagagacagcaggagatggaaagagcatcaaagcgtttaaggaatctgcaaagcagatgctggacccagcaaactatggaactgggatggagaggtggccaagaacacctaaggaagaggcccaatcactagaagacctggccggcttcaaagagctcttccagacaccagaccacactgaggaatcaacaactgatgacaaaactaccaaaatagcctgcaaatctccaccaccagaatcaatggacactccaacaagcacaaggaggcggcccaaaacacctttggggaaaagggatatagtggaagagctctcagccctgaagcagctcacacagaccacacacacagacaaagtaccaggagatgaggataaaggcatcaacgtgttcagggaaactgcaaaacagaaactggacccagcagcaagtgtaactggtagcaagaggcagccaagaactcctaagggaaaagcccaacccctagaagacttggctggcttgaaagagctcttccagacaccagtatgcactgacaagcccacgactcacgagaaaactaccaaaatagcctgcagatctccacaaccagacccagtgggtaccccaacaatcttcaagccacagtccaagagaagtctcaggaaagcagacgtagaggaagaatccttagcactcaggaaacgaacaccatcagtagggaaagctatggacacacccaaaccagcaggaggtgatgagaaagacatgaaagcatttatgggaactccagtgcagaaattggacctgccaggaaatttacctggcagcaaaagatggccacaaactcctaaggaaaaggcccaggctctagaagacctggctggcttcaaagagctcttccagacaccaggcactgacaagcccacgactgatgagaaaactaccaaaatagcctgcaaatctccacaaccagacccagtggacaccccagcaagcacaaagcaacggcccaagagaaacctcaggaaagcagacgtagaggaagaatttttagcactcaggaaacgaacaccatcagcaggcaaagccatggacaccccaaaaccagcagtaagtgatgagaaaaatatcaacacatttgtggaaactccagtgcagaaactggacctgctaggaaatttacctggcagcaagagacagccacagactcctaaggaaaaggctgaggctctagaggacctggttggcttcaaagaactcttccagacaccaggtcacactgaggaatcaatgactgatgacaaaatcacagaagtatcctgtaaatctccacagccagagtcattcaaaacctcaagaagctccaagcaaaggctcaagatacccctggtgaaagtggacatgaaagaagagcccctagcagtcagcaagctcacacggacatcaggggagactacgcaaacacacacagagccaacaggagatagtaagagcatcaaagcgtttaaggagtctccaaagcagatcctggacccagcagcaagtgtaactggtagcaggaggcagctgagaactcgtaaggaaaaggcccgtgctctagaagacctggttgacttcaaagagctcttctcagcaccaggtcacactgaagagtcaatgactattgacaaaaacacaaaaattccctgcaaatctcccccaccagaactaacagacactgccacgagcacaaagagatgccccaagacacgtcccaggaaagaagtaaaagaggagctctcagcagttgagaggctcacgcaaacatcagggcaaagcacacacacacacaaagaaccagcaagcggtgatgagggcatcaaagtattgaagcaacgtgcaaagaagaaaccaaacccagtagaagaggaacccagcaggagaaggccaagagcacctaaggaaaaggcccaacccctggaagacctggccggcttcacagagctctctgaaacatcaggtcacactcaggaatcactgactgctggcaaagccactaaaataccctgcgaatctcccccactagaagtggtagacaccacagcaagcacaaagaggcatctcaggacacgtgtgcagaaggtacaagtaaaagaagagccttcagcagtcaagttcacacaaacatcaggggaaaccacggatgcagacaaagaaccagcaggtgaagataaaggcatcaaagcattgaaggaatctgcaaaacagacaccggctccagcagcaagtgtaactggcagcaggagacggccaagagcacccagggaaagtgcccaagccatagaagacctagctggcttcaaagacccagcagcaggtcacactgaagaatcaatgactgatgacaaaaccactaaaataccctgcaaatcatcaccagaactagaagacaccgcaacaagctcaaagagacggcccaggacacgtgcccagaaagtagaagtgaaggaggagctgttagcagttggcaagctcacacaaacctcaggggagaccacgcacaccgacaaagagccggtaggtgagggcaaaggcacgaaagcatttaagcaacctgcaaagcggaacgtggacgcagaagatgtaattggcagcaggagacagccaagagcacctaaggaaaaggcccaacccctggaagacctggccagcttccaagagctctctcaaacaccaggccacactgaggaactggcaaatggtgctgctgatagctttacaagcgctccaaagcaaacacctgacagtggaaaacctctaaaaatatccagaagagttcttcgggcccctaaagtagaacccgtgggagacgtggtaagcaccagagaccctgtaaaatcacaaagcaaaagcaacacttccctgcccccactgcccttcaagaggggaggtggcaaagatggaagcgtcacgggaaccaagaggctgcgctgcatgccagcaccagaggaaattgtggaggagctgccagccagcaagaagcagagggttgctcccagggcaagaggcaaatcatccgaacccgtggtcatcatgaagagaagtttgaggacttctgcaaaaagaattgaacctgcggaagagctgaacagcaacgacatgaaaaccaacaaagaggaacacaaattacaagactcggtccctgaaaataagggaatatccctgcgctccagacgccaagataagactgaggcagaacagcaaataactgaggtctttgtattagcagaaagaatagaaataaacagaaatgaaaagaagcccatgaagacctccccagagatggacattcagaatccagatgatggagcccggaaacccatacctagagacaaagtcactgagaacaaaaggtgcttgaggtctgctagacagaatgagagctcccagcctaaggtggcagaggagagcggagggcagaagagtgcgaaggttctcatgcagaatcagaaagggaaaggagaagcaggaaattcagactccatgtgcctgagatcaagaaagacaaaaagccagcctgcagcaagcactttggagagcaaatctgtgcagagagtaacgcggagtgtcaagaggtgtgcagaaaatccaaagaaggctgaggacaatgtgtgtgtcaagaaaataacaaccagaagtcatagggacagtgaagatatttgacagaaaaatcgaactgggaaaaatataataaagttagttttgtgataagttctagtgcagtttttgtcataaattacaagtgaattctgtaagtaaggctgtcagtctgcttaagggaagaaaactttggatttgctgggtctgaatcggcttcataaactccactgggagcactgctgggctcctggactgagaatagttgaacaccgggggctttgtgaaggagtctgggccaaggtttgccctcagctttgcagaatgaagccttgaggtctgtcaccacccacagccaccctacagcagccttaactgtgacacttgccacactgtgtcgtcgtttgtttgcctatgttctccagggcacggtggcaggaacaactatcctcgtctgtcccaacactgagcaggcactcggtaaacacgaatgaatggataagcgcacggatgaatggagcttacaagatctgtctttccaatggccgggggcatttggtccccaaattaaggctattggacatctgcacaggacagtcctatttttgatgtcctttcctttctgaaaataaagttttgtgctttggagaatgactcgtgagcacatctttagggaccaagagtgactttctgtaaggagtgactcgtggcttgccttggtctcttgggaatacttttctaactagggttgctctcacctgagacattctccacccgcggaatctcagggtcccaggctgtgggccatcacgacctcaaactggctcctaatctccagctttcctgtcattgaaagcttcggaagtttactggctctgctcccgcctgttttctttctgactctatctggcagcccgatgccacccagtacaggaagtgacaccagtactctgtaaagcatcatcatccttggagagactgagcactcagcaccttcagccacgatttcaggatcgcttccttgtgagccgctgcctccgaaatctcctttgaagcccagacatctttctccagcttcagacttgtagatataactcgttcatcttcatttactttccactttgccccctgtcctctctgtgttccccaaatcagagaatagcccgccatcccccagatcacctgtctggattcctccccattcacccaccttgccaggtgcaggtgaggatggtgcaccagacagggtagctgtcccccaaaatgtgccctgtgcgggcagtgccctgtctccacgtttgtttccccagtgtctggcggggagccaggtgacatcataaatacttgctgaatgaatgcagaaatcagcggtactgacttgtactatattggctgccatgatagggttctcacagcgtcatccatgatcgtaagggagaatgacattctgcttgagggagggaatagaaaggggcagggaggggacatctgagggcttcacagggctgcaaagggtacagggattgcaccagggcagaacaggggagggtgttcaaggaagagtggctcttagcagaggcactttggaaggtgtgaggcataaatgcttccttctacgtaggccaacctcaaaactttcagtaggaatgttgctatgatcaagttgttctaacactttagacttagtagtaattatgaacctcacatagaaaaatttcatccagccatatgcctgtggagtggaatattctgtttagtagaaaaatcctttagagttcagctctaaccagaaatcttgctgaagtatgtcagcaccttttctcaccctggtaagtacagtatttcaagagcacgctaagggtggttttcattttacagggctgttgatgatgggttaaaaatgttcatttaagggctacccccgtgtttaatagatgaacaccacttctacacaaccctccttggtactgggggagggagagatctgacaaatactgcccattcccctaggctgactggatttgagaacaaatacccacccatttccaccatggtatggtaacttctctgagcttcagtttccaagtgaatttccatgtaataggacattcccattaaatacaagctgtttttactttttcgcctcccagggcctgtgcgatctggtcccccagcctctcttgggctttcttacactaactctgtacctaccatctcctgcctcccttaggcaggcacctccaaccaccacacactccctgctgttttccctgcctggaactttcccaccagccccaccaagatcatttcatccagtcctgagctcagcttaagggaggcttcttgcctgtgggttccctcacccccatgcctgtcctccaggctggggcaggttcttagtttgcctggaattgttctgtacctctttgtagcacgtagtgttgtgaaactaagccactaattgagtttctggctcccctcctggggttgtaagttttgttcattcatgagggccgactgtatttcctggttactgtatcccagtgaccagccacaggagatgtccaataaagtatgtgatgaaatggtcttaaaaaaaaaaaaaaaaaaaaaa

SEQ ID NO: 359 - protein, 1015 aa, Homo sapiens
MGPPLPLLLLLLLLLPPRVLPAAPSSVPRGRQLPGRLGCLLEEGLCGASEACVNDGVFGRCQKVPAMDFYRYEVSPVALQRLRVALQKLSGTGFTWQDDYTQYVMDQELADLPKTYLRRPEASSPARPSKHSVGSERRYSREGGAALANALRRHLPFLEALSQAPASDVLARTHTAQDRPPAEGDDRFSESILTYVAHTSALTYPPGPRTQLREDLLPRTLGQLQPDELSPKVDSGVDRHHLMAALSAYAAQRPPAPPGEGSLEPQYLLRAPSRMPRPLLAPAAPQKWPSPLGDSEDPSSTGDGARIHTLLKDLQRQPAEVRGLSGLELDGMAELMAGLMQGVDHGVARGSPGRAALGESGEQADGPKATLRGDSFPDDGVQDDDDRLYQEVHRLSATLGGLLQDHGSRLLPGALPFARPLDMERKKSEHPESSLSSEEETAGVENVKSQTYSKDLLGQQPHSEPGAAAFGELQNQMPGPSKEEQSLPAGAQEALSDGLQLEVQPSEEEARGYIVTDRDPLRPEEGRRLVEDVARLLQVPSSAFADVEVLGPAVTFKVSANVQNVTTEDVEKATVDNKDKLEETSGLKILQTGVGSKSKLKFLPPQAEQEDSTKFIALTLVSLACILGVLLASGLIYCLRHSSQHRLKEKLSGLGGDPGADATAAYQELCRQRMATRPPDRPEGPHTSRISSVSSQFSDGPIPSPSARSSASSWSEEPVQSNMDISTGHMILSYMEDHLKNKNRLEKEWEALCAYQAEPNSSFVAQREENVPKNRSLAVLTYDHSRVLLKAENSHSHSDYINASPIMDHDPRNPAYIATQGPLPATVADFWQMVWESGCVVIVMLTPLAENGVRQCYHYWPDEGSNLYHIYEVNLVSEHIWCEDFLVRSFYLKNLQTNETRTVTQFHFLSWYDRGVPSSSRSLLDFRRKVNKCYRGRSCPIIVHCSDGAGRSGTYVLIDMVLNKMAKGAKEIDIAATLEHLRDQRPGMVQTKEQFEFALTAVAEEVNAILKALPQ

SEQ ID NO: 360 - DNA, 4767 bp, Homo sapiens
gcctcccgccgcctcccgcgcggccatggactgagcgccgccggccaggccgcggggatggggccgccgctcccgctgctgctgctgctactgctgctgctgccgccacgcgtcctgcctgccgccccttcgtccgtcccccgcggccggcagctcccggggcgtctgggctgcctgctcgaggagggcctctgcggagcgtccgaggcctgtgtgaacgatggagtgtttggaaggtgccagaaggttccggcaatggacttttaccgctacgaggtgtcgcccgtggccctgcagcgcctgcgcgtggcgttgcagaagctttccggcacaggtttcacgtggcaggatgactatactcagtatgtgatggaccaggaacttgcagacctcccgaaaacctacctgaggcgtcctgaagcatccagcccagccaggccctcaaaacacagcgttggcagcgagaggaggtacagtcgggagggcggtgctgccctggccaacgccctccgacgccacctgcccttcctggaggccctgtcccaggccccagcctcagacgtgctcgccaggacccatacggcgcaggacagaccccccgctgagggtgatgaccgcttctccgagagcatcctgacctatgtggcccacacgtctgcgctgacctaccctcccgggccccggacccagctccgcgaggacctcctgccgcggaccctcggccagctccagccagatgagctcagccctaaggtggacagtggtgtggacagacaccatctgatggcggccctcagtgcctatgctgcccagaggcccccagctccccccggggagggcagcctggagccacagtaccttctgcgtgcaccctcaagaatgcccaggcctttgctggcaccagccgccccccagaagtggccttcacctctgggagattccgaagacccctccagcacaggcgatggagcacggattcataccctcctgaaggacctgcagaggcagccggctgaggtgaggggcctgagtggcctggagctggacggcatggctgagctgatggctggcctgatgcaaggcgtggaccatggagtagctcgaggcagccctgggagagcggccctgggagagtctggagaacaggcggatggccccaaggccaccctccgtggagacagctttccagatgacggagtgcaggacgacgatgatagactttaccaagaggtccatcgtctgagtgccacactcgggggcctcctgcaggaccacgggtctcgactcttacctggagccctcccctttgcaaggcccctcgacatggagaggaagaagtccgagcaccctgagtcttccctgtcttcagaagaggagactgccggagtggagaacgtcaagagccagacgtattccaaagatctgctggggcagcagccgcattcggagcccggggccgctgcgtttggggagctccaaaaccagatgcctgggccctcgaaggaggagcagagccttccagcgggtgctcaggaggccctcagcgacggcctgcaattggaggtccagccttccgaggaagaggcgcggggctacatcgtgacagacagagaccccctgcgccccgaggaaggaaggcggctggtggaggacgtcgcccgcctcctgcaggtgcccagcagtgcgttcgctgacgtggaggttctcggaccagcagtgaccttcaaagtgagcgccaatgtccaaaacgtgaccactgaggatgtggagaaggccacagttgacaacaaagacaaactggaggaaacctctggactgaaaattcttcaaaccggagtcgggtcgaaaagcaaactcaagttcctgcctcctcaggcggagcaagaagactccaccaagttcatcgcgctcaccctggtctccctcgcctgcatcctgggcgtcctcctggcctctggcctcatctactgcctccgccatagctctcagcacaggctgaaggagaagctctcgggactagggggcgacccaggtgcagatgccactgccgcctaccaggagctgtgccgccagcgtatggccacgcggccaccagaccgacctgagggcccgcacacgtcacgcatcagcagcgtctcatcccagttcagcgacgggccgatccccagcccctccgcacgcagcagcgcctcatcctggtccgaggagcctgtgcagtccaacatggacatctccaccggccacatgatcctgtcctacatggaggaccacctgaagaacaagaaccggctggagaaggagtgggaagcgctgtgcgcctaccaggcggagcccaacagctcgttcgtggcccagagggaggagaacgtgcccaagaaccgctccctggctgtgctgacctatgaccactcccgggtcctgctgaaggcggagaacagccacagccactcagactacatcaacgctagccccatcatggatcacgacccgaggaaccccgcgtacatcgccacccagggaccgctgcccgccaccgtggctgacttttggcagatggtgtgggagagcggctgcgtggtgatcgtcatgctgacacccctcgcggagaacggcgtccggcagtgctaccactactggccggatgaaggctccaatctctaccacatctatgaggtgaacctggtctccgagcacatctggtgtgaggacttcctggtgaggagcttctatctgaagaacctgcagaccaacgagacgcgcaccgtgacgcagttccacttcctgagttggtatgaccgaggagtcccttcctcctcaaggtccctcctggacttccgcagaaaagtaaacaagtgctacaggggccgttcttgtccaataattgttcattgcagtgacggtgcaggccggagcggcacctacgtcctgatcgacatggttctcaacaagatggccaaaggtgctaaagagattgatatcgcagcgaccctggagcacttgagggaccagagacccggcatggtccagacgaaggagcagtttgagttcgcgctgacagccgtggctgaggaggtgaacgccatcctcaaggcccttccccagtgagcggcagcctcaggggcctcaggggagcccccaccccacggatgttgtcaggaatcatgatctgactttaattgtgtgtcttctattataactgcatagtaatagggcccttagctctcccgtagtcagcgcagtttagcagttaaaagtgtatttttgtttaatcaaacaataataaagagagatttgtggaaaaatccagttacgggtggaggggaatcggttcatcaattttcacttgcttaaaaaaaatactttttcttaaagcacccgttcaccttcttggttgaagttgtgttaacaatgcagtagccagcacgttcgaggcggtttccaggaagagtgtgcttgtcatctgccactttcgggagggtggatccactgtgcaggagtggccggggaagctggcagcactcagtgaggccgcccggcacacaaggcacgtttggcatttctctttgagagagtttatcattgggagaagccgcggggacagaactgaacgtcctgcagcttcggggcaagtgagacaatcacagctcctcgctgcgtctccatcaacactgcgccgggtaccatggacggccccgtcagccacacctgtcagcccaagcagagtgattcaggggctccccgggggcagacacctgtgcaccccatgagtagtgcccacttgaggctggcactcccctgacctcacctttgcaaagttacagatgcaccccaacattgagatgtgtttttaatgttaaaatattgatttctacgttatgaaaacagatgcccccgtgaatgcttacctgtgagataaccacaaccaggaagaacaaatctgggcattgagcaagctatgagggtccccgggagcacacgaaccctgccaggcccccgctggctcctccaggcacgtcccggacctgtggggccccagagaggggacatttccctcctgggagagaaggagatcagggcaactcggagagggctgcgagcatttccctcccgggagaggagatcagggcgacctgcacgcactgcgtagagcctggaagggaagtgagaaaccagccgaccggccctgcccctcttcccgggatcacttaatgaaccacgtgttttgacatcatgtaaacctaagcacgtagagatgattcggatttgacaaaataacatttgagtatccgattcgccatcaccccctaccccagaaataggacaattcacttcattgaccaggatgatcacatggaaggcggcgcagaggcagctgtgtgggctgcagatttcctgtgtggggttcagcgtagaaaacgcacctccatcccgcccttcccacagcattcctccatcttagatagatggtactctccaaaggccctaccagagggaacacggcctactgagcggacagaatgatgccaaaatattgcttatgtctctacatggtattgtaatgaatatctgctttaatatagctatcatttcttttccaaaattacttctctctatctggaatttaattaatcgaaatgaatttatctgaatataggaagcatatgcctacttgtaatttctaactccttatgtttgaagagaaacctccggtgtgagatatacaaatatatttaattgtgtcatattaaacttctgattcaaaaaaaa

SEQ ID NO: 361 - protein, 770 aa, Homo sapiens
MANSMNGRNPGGRGGNPRKGRILGIIDAIQDAVGPPKQAAADRRTVEKTWKLMDKVVRLCQNPKLQLKNSPPYILDILPDTYQHLRLILSKYDDNQKLAQLSENEYFKIYIDSLMKKSKRAIRLFKEGKERMYEEQSQDRRNLTKLSLIFSHMLAEIKAIFPNGQFQGDNFRITKADAAEFWRKFFGDKTIVPWKVFRQCLHEVHQISSSLEAMALKSTIDLTCNDYISVFEFDIFTRLFQPWGSILRNWNFLAVTHPGYMAFLTYDEVKARLQKYSTKPGSYIFRLSCTRLGQWAIGYVTGDGNILQTIPHNKPLFQALIDGSREGFYLYPDGRSYNPDLTGLCEPTPHDHIKVTQEQYELYCEMGSTFQLCKICAENDKDVKIEPCGHLMCTSCLTAWQESDGQGCPFCRCEIKGTEPIIVDPFDPRDEGSRCCSIIDPFGMPMLDLDDDDDREESLMMNRLANVRKCTDRQNSPVTSPGSSPLAQRRKPQPDPLQIPHLSLPPVPPRLDLIQKGIVRSPCGSPTGSPKSSPCMVRKQDKPLPAPPPPLRDPPPPPPERPPPIPPDNRLSRHIHHVESVPSRDPPMPLEAWCPRDVFGTNQLVGCRLLGEGSPKPGITASSNVNGRHSRVGSDPVLMRKHRRHDLPLEGAKVFSNGHLGSEEYDVPPRLSPPPPVTTLLPSIKCTGPLANSLSEKTRDPVEEDDDEYKIPSSHPVSLNSQPSHCHNVKPPVRSCDNGHCMLNGTHGPSSEKKSNIPDLSIYLKGTYRI

SEQ ID NO: 362 - DNA, 3354 bp, Homo sapiens
ctgggtcctgtgtgtgccacaggggtggggtgtccagcgagcggtctcctcctcctgctagtgctgctgcggcgtcccgcggcctccccgagtcgggcgggaggggagagcgggtgtggatttgtcttgacggtaattgttgcgtttccacgtctcggaggcctgcgcgctgggttgctccttcttcgggagcgagctgttctcagcgatcccactcccagccggggctccccacacacactgggctgcgtgcgtgtggagtgggacccgcgcacacgcgtgtctctggacagctacggcgccgaaagaactaaaattccagatggcaaactcaatgaatggcagaaaccctggtggtcgaggaggaaatccccgaaaaggtcgaattttgggtattattgatgctattcaggatgcagttggaccccctaagcaagctgccgcagatcgcaggaccgtggagaagacttggaagctcatggacaaagtggtaagactgtgccaaaatcccaaacttcagttgaaaaatagcccaccatatatacttgatattttgcctgatacatatcagcatttacgacttatattgagtaaatatgatgacaaccagaaacttgcccaactcagtgagaatgagtactttaaaatctacattgatagccttatgaaaaagtcaaaacgggcaataagactctttaaagaaggcaaggagagaatgtatgaagaacagtcacaggacagacgaaatctcacaaaactgtcccttatcttcagtcacatgctggcagaaatcaaagcaatctttcccaatggtcaattccagggagataactttcgtatcacaaaagcagatgctgctgaattctggagaaagttttttggagacaaaactatcgtaccatggaaagtattcagacagtgccttcatgaggtccaccagattagctctagcctggaagcaatggctctaaaatcaacaattgatttaacttgcaatgattacatttcagtttttgaatttgatatttttaccaggctgtttcagccttggggctctattttgcggaattggaatttcttagctgtgacacatccaggttacatggcatttctcacatatgatgaagttaaagcacgactacagaaatatagcaccaaacccggaagctatattttccggttaagttgcactcgattgggacagtgggccattggctatgtgactggggatgggaatatcttacagaccatacctcataacaagcccttatttcaagccctgattgatggcagcagggaaggattttatctttatcctgatgggaggagttataatcctgatttaactggattatgtgaacctacacctcatgaccatataaaagttacacaggaacaatatgaattatattgtgaaatgggctccacttttcagctctgtaagatttgtgcagagaatgacaaagatgtcaagattgagccttgtgggcatttgatgtgcacctcttgccttacggcatggcaggagtcggatggtcagggctgccctttctgtcgttgtgaaataaaaggaactgagcccataatcgtggacccctttgatccaagagatgaaggctccaggtgttgcagcatcattgacccctttggcatgccgatgctagacttggacgacgatgatgatcgtgaggagtccttgatgatgaatcggttggcaaacgtccgaaagtgcactgacaggcagaactcaccagtcacatcaccaggatcctctccccttgcccagagaagaaagccacagcctgacccactccagatcccacatctaagcctgccacccgtgcctcctcgcctggatctaattcagaaaggcatagttagatctccctgtggcagcccaacaggttcaccaaagtcttctccttgcatggtgagaaaacaagataaaccactcccagcaccacctcctcccttaagagatcctcctccaccgccacctgaaagacctccaccaatcccaccagacaatagactgagtagacacatccatcatgtggaaagcgtgccttccagagacccgccaatgcctcttgaagcatggtgccctcgggatgtgtttgggactaatcagcttgtgggatgtcgactcctaggggagggctctccaaaacctggaatcacagcgagttcaaatgtcaatggaaggcacagtagagtgggctctgacccagtgcttatgcggaaacacagacgccatgatttgcctttagaaggagctaaggtcttttccaatggtcaccttggaagtgaagaatatgatgttcctccccggctttctcctcctcctccagttaccaccctcctccctagcataaagtgtactggtccgttagcaaattctctttcagagaaaacaagagacccagtagaggaagatgatgatgaatacaagattccttcatcccaccctgtttccctgaattcacaaccatctcattgtcataatgtaaaacctcctgttcggtcctgtgataatggtcactgtatgctgaatggaacacatggtccatcttcagagaagaaatcaaacatccctgacttaagcatatatttaaagggtacgtatagaatataatttcctttgtgatgtacatcttaatggtcagaatttaaaggcaaaatttcatgccattgtactgaaaatacattaaggttttgtgttatcctctaggagatgtttttgattcagcctctgatcccgtgccattaccacctgccaggcctccaactcgggacaatccaaagcatggttcttcactcaacaggacgccctctgattatgatcttctcatccctccattaggttgaaacctttaaaaaagttttgaacaacccacccctccttcttttaatttcagaattttcagaattcagagttcagtataacacagactcactgggttgtgaatttgcctgaaatttgaatgggttctccaggtgccggtgactcccaagttcacgagaccattactccatgtagatgattaaggtagtagtgtagtagttgggcatcagtcaggttttaagcaagttgttttgtccatactaaatgtagtctaaaaacacatgagagctttgtgctctagtagttttgaagtgatgacttgaagtgttgagattttctttaagtataataattcttaataaatatgaacttgcttttcttgcagcatgagcaccagttccacttacgctaattaaattatgcaaaattaaatagttgtatgtagagaactgataataaattctgttttattctaatcattacaactgtaacacattcaaaaaaaaaaa

SEQ ID NO: 363 - protein, 432 aa, Homo sapiens
MLGNSAPGPATREAGSALLALQQTALQEDQENINPEKAAPVQQPRTRAALAVLKSGNPRGLAQQQRPKTRRVAPLKDLPVNDEHVTVPPWKANSKQPAFTIHVDEAEKEAQKKPAESQKIEREDALAFNSAISLPGPRKPLVPLDYPMDGSFESPHTMDMSIVLEDEKPVSVNEVPDYHEDIHTYLREMEVKCKPKVGYMKKQPDITNSMRAILVDWLVEVGEEYKLQNETLHLAVNYIDRFLSSMSVLRGKLQLVGTAAMLLASKFEEIYPPEVAEFVYITDDTYTKKQVLRMEHLVLKVLTFDLAAPTVNQFLTQYFLHQQPANCKVESLAMFLGELSLIDADPYLKYLPSVIAGAAFHLALYTVTGQSWPESLIRKTGYTLESLKPCLMDLHQTYLKAPQHAQQSIREKYKNSKYHGVSLLNPPETLNL

SEQ ID NO: 364 - DNA, 1682 bp, Homo sapiens
cggcagccagcctattctttggccgggtcggtgcgagtggtcggctgggcagagtgcacgctgcttggcgccgcaggctgatcccgccgtccactcccgggagcagtgatgttgggcaactctgcgccggggcctgcgacccgcgaggcgggctcggcgctgctagcattgcagcagacggcgctccaagaggaccaggagaatatcaacccggaaaaggcagcgcccgtccaacaaccgcggacccgggccgcgctggcggtactgaagtccgggaacccgcggggtctagcgcagcagcagaggccgaagacgagacgggttgcaccccttaaggatcttcctgtaaatgatgagcatgtcaccgttcctccttggaaagcaaacagtaaacagcctgcgttcaccattcatgtggatgaagcagaaaaagaagctcagaagaagccagctgaatctcaaaaaatagagcgtgaagatgccctggcttttaattcagccattagtttacctggacccagaaaaccattggtccctcttgattatccaatggatggtagttttgagtcaccacatactatggacatgtcaattgtattagaagatgaaaagccagtgagtgttaatgaagtaccagactaccatgaggatattcacacataccttagggaaatggaggttaaatgtaaacctaaagtgggttacatgaagaaacagccagacatcactaacagtatgagagctatcctcgtggactggttagttgaagtaggagaagaatataaactacagaatgagaccctgcatttggctgtgaactacattgataggttcctgtcttccatgtcagtgctgagaggaaaacttcagcttgtgggcactgctgctatgctgttagcctcaaagtttgaagaaatataccccccagaagtagcagagtttgtgtacattacagatgatacctacaccaagaaacaagttctgagaatggagcatctagttttgaaagtccttacttttgacttagctgctccaacagtaaatcagtttcttacccaatactttctgcatcagcagcctgcaaactgcaaagttgaaagtttagcaatgtttttgggagaattaagtttgatagatgctgacccatacctcaagtatttgccatcagttattgctggagctgcctttcatttagcactctacacagtcacgggacaaagctggcctgaatcattaatacgaaagactggatataccctggaaagtcttaagccttgtctcatggaccttcaccagacctacctcaaagcaccacagcatgcacaacagtcaataagagaaaagtacaaaaattcaaagtatcatggtgtttctctcctcaacccaccagagacactaaatctgtaacaatgaaagactgcctttgttttctaagatgtaaatcactcaaagtatatggtgtacagtttttaacttaggttttaattttacaatcatttctgaatacagaagttgtggccaagtacaaattatggtatctattactttttaaatggttttaatttgtatatcttttgtatatgtatctgtcttagatatttggctaattttaagtggttttgttaaagtattaatgatgccagctgtcaggataataaattgatttggaaaacttaaaaaaa

SEQ ID NO: 365 - protein, 289 aa, Homo sapiens
MENGYTYEDYKNTAEWLLSHTKHRPQVAIICGSGLGGLTDKLTQAQIFDYSEIPNFPRSTVPGHAGRLVFGFLNGRACVMMQGRFHMYEGYPLWKVTFPVRVFHLLGVDTLVVTNAAGGLNPKFEVGDIMLIRDHINLPGFSGQNPLRGPNDERFGDRFPAMSDAYDRTMRQRALSTWKQMGEQRELQEGTYVMVAGPSFETVAECRVLQKLGADAVGMSTVPEVIVARHCGLRVFGFSLITNKVIMDYESLEKANHEEVLAAGKQAAQKLEQFVSILMASIPLPDKAS

SEQ ID NO: 366 - DNA, 1418 bp, Homo sapiens
aactgtgcgaaccagacccggcagccttgctcagttcagcatagcggagcggatccgatcggatcggagcacaccggagcaggctcatcgagaaggcgtctgcgagaccatggagaacggatacacctatgaagattataagaacactgcagaatggcttctgtctcatactaagcaccgacctcaagttgcaataatctgtggttctggattaggaggtctgactgataaattaactcaggcccagatctttgactacagtgaaatccccaactttcctcgaagtacagtgccaggtcatgctggccgactggtgtttgggttcctgaatggcagggcctgtgtgatgatgcagggcaggttccacatgtatgaagggtacccactctggaaggtgacattcccagtgagggttttccaccttctgggtgtggacaccctggtagtcaccaatgcagcaggagggctgaaccccaagtttgaggttggagatatcatgctgatccgtgaccatatcaacctacctggtttcagtggtcagaaccctctcagagggcccaatgatgaaaggtttggagatcgtttccctgccatgtctgatgcctacgaccggactatgaggcagagggctctcagtacctggaaacaaatgggggagcaacgtgagctacaggaaggcacctatgtgatggtggcaggccccagctttgagactgtggcagaatgtcgtgtgctgcagaagctgggagcagacgctgttggcatgagtacagtaccagaagttatcgttgcacggcactgtggacttcgagtctttggcttctcactcatcactaacaaggtcatcatggattatgaaagcctggagaaggccaaccatgaagaagtcttagcagctggcaaacaagctgcacagaaattggaacagtttgtctccattcttatggccagcattccactccctgacaaagccagttgacctgccttggagtcgtctggcatctcccacacaagacccaagtagctgctaccttctttggccccttgctggagtcatgtgcctctgtccttaggttgtagcagaaaggaaaagattcctgtccttcacctttcccactttcttctaccagacccttctggtgccagatcctcttctcaaagctgggattacaggtgtgagcatagtgagaccttggcgctacaaaataaagctgttctcattcctgttctttcttacacaagagctggagcccgtgccctaccacacatctgtggagatgcccaggatttgactcgggccttagaactttgcatagcagctgctactagctctttgagataatacattccgaggggctcagttctgccttatctaaatcaccagagaccaaacaaggactaatccaatacctcttgga

SEQ ID NO: 367 - protein, 281 aa, Homo sapiens [sequence omitted]

SEQ ID NO: 368 - DNA, 1776 bp, Homo sapiens
tttcatttcctcactgactataaaagaatagagaaggaagggcttcagtgaccggctgcctggctgacttacagcagtcagactctgacaggatcatggctatgatggaggtccaggggggacccagcctgggacagacctgcgtgctgatcgtgatcttcacagtgctcctgcagtctctctgtgtggctgtaacttacgtgtactttaccaacgagctgaagcagatgcaggacaagtactccaaaagtggcattgcttgtttcttaaaagaagatgacagttattgggaccccaatgacgaagagagtatgaacagcccctgctggcaagtcaagtggcaactccgtcagctcgttagaaagatgattttgagaacctctgaggaaaccatttctacagttcaagaaaagcaacaaaatatttctcccctagtgagagaaagaggtcctcagagagtagcagctcacataactgggaccagaggaagaagcaacacattgtcttctccaaactccaagaatgaaaaggctctgggccgcaaaataaactcctgggaatcatcaaggagtgggcattcattcctgagcaacttgcacttgaggaatggtgaactggtcatccatgaaaaagggttttactacatctattcccaaacatactttcgatttcaggaggaaataaaagaaaacacaaagaacgacaaacaaatggtccaatatatttacaaatacacaagttatcctgaccctatattgttgatgaaaagtgctagaaatagttgttggtctaaagatgcagaatatggactctattccatctatcaagggggaatatttgagcttaaggaaaatgacagaatttttgtttctgtaacaaatgagcacttgatagacatggaccatgaagccagttttttcggggcctttttagttggctaactgacctggaaagaaaaagcaataacctcaaagtgactattcagttttcaggatgatacactatgaagatgtttcaaaaaatctgaccaaaacaaacaaacagaaaacagaaaacaaaaaaacctctatgcaatctgagtagagcagccacaaccaaaaaattctacaacacacactgttctgaaagtgactcacttatcccaagagaatgaaattgctgaaagatctttcaggactctacctcatatcagtttgctagcagaaatctagaagactgtcagcttccaaacattaatgcaatggttaacatcttctgtctttataatctactccttgtaaagactgtagaagaaagagcaacaatccatctctcaagtagtgtatcacagtagtagcctccaggtttccttaagggacaacatccttaagtcaaaagagagaagaggcaccactaaaagatcgcagtttgcctggtgcagtggctcacacctgtaatcccaacattttgggaacccaaggtgggtagatcacgagatcaagagatcaagaccatagtgaccaacatagtgaaaccccatctctactgaaagtacaaaaattagctgggtgtgttggcacatgcctgtagtcccagctacttgagaggctgaggcaagagaattgtttgaacccgggaggcagaggttgcagtgtggtgagatcatgccactacactccagcctggcgacagagcgagacttggtttcaaaaaaaaaaaaaaaaaaaacttcagtaagtacgtgttatttttttcaataaaattctattacagtatgtcaaaaaaaaaaaaaaaaaa

SEQ ID NO: 369 - protein, 564 aa, Homo sapiens
MKEHGGTFSSTGISGGSGDSAMDSLQPLQPNYMPVCLFAEESYQKLAMETLEELDWCLDQLETIQTYRSVSEMASNKFKRMLNRELTHLSEMSRSGNQVSEYISNTFLDKQNDVEIPSPTQKDREKKKKQQLMTQISGVKKLMHSSSLNNTSISRFGVNTENEDHLAKELEDLNKWGLNIFNVAGYSHNRPLTCIMYAIFQERDLLKTFRISSDTFITYMMTLEDHYHSDVAYHNSLHAADVAQSTHVLLSTPALDAVFTDLEILAAIFAAAIHDVDHPGVSNQFLINTNSELALMYNDESVLENHHLAVGFKLLQEEHCDIFMNLTKKQRQTLRKMVIDMVLATDMSKHMSLLADLKTMVETKKVTSSGVLLLDNYTDRIQVLRNMVHCADLSNPTKSLELYRQWTDRIMEEFFQQGDKERERGMEISPMCDKHTASVEKSQVGFIDYIVHPLWETWADLVQPDAQDILDTLEDNRNWYQSMIPQSPSPPLDEQNRDCQGLMEKFQFELTLDEEDSEGPEKEGEGHSYFSSTKTLCVIDPENRDSLGETDIDIATEDKSPVDT

SEQ ID NO: 370 - DNA, 4068 bp, Homo sapiens
gaattcctcctctcttcaccccgttagctgttttcaatgtaatgctgccgtccttctcttgcactgccttctgcgctaacacctccattcctgtttataaccgtgtatttattacttaatgtatataatgtaatgttttgtaagttattaatttatatatctaacattgcctgccaatggtggtgttaaatttgtgtagaaaactctgcctaagagttacgactttttcttgtaatgttttgtattgtgtattatataacccaaacgtcacttagtagagacatatggcccccttggcagagaggacaggggtgggcttttgttcaaagggtctgccctttccctgcctgagttgctacttctgcacaacccctttatgaaccagttttcacccgaattttgactgtttcatttagaagaaaagcaaaatgagaaaaagctttcctcatttctccttgagatggcaaagcactcagaaatgacatcacataccctaaagaaccctgggatgactaaggcagagagagtctgagaaaactctttggtgcttctgcctttagttttaggacacatttatgcagatgagcttataagagaccgttccctccgccttcttcctcagaggaagtttcttggtagatcaccgacacctcatccaggcggggggttggggggaaacttggcaccagccatcccaggcagagcaccactgtgatttgttctcctggtggagagagctggaaggaaggagccagcgtgcaaataatgaaggagcacgggggcaccttcagtagcaccggaatcagcggtggtagcggtgactctgctatggacagcctgcagccgctccagcctaactacatgcctgtgtgtttgtttgcagaagaatcttatcaaaaattagcaatggaaacgctggaggaattagactggtgtttagaccagctagagaccatacagacctaccggtctgtcagtgagatggcttctaacaagttcaaaagaatgctgaaccgggagctgacacacctctcagagatgagccgatcagggaaccaggtgtctgaatacatttcaaatactttcttagacaagcagaatgatgtggagatcccatctcctacccagaaagacagggagaaaaagaaaaagcagcagctcatgacccagataagtggagtgaagaaattaatgcatagttcaagcctaaacaatacaagcatctcacgctttggagtcaacactgaaaatgaagatcacctggccaaggagctggaagacctgaacaaatggggtcttaacatctttaatgtggctggatattctcacaatagacccctaacatgcatcatgtatgctatattccaggaaagagacctcctaaagacattcagaatctcatctgacacatttataacctacatgatgactttagaagaccattaccattctgacgtggcatatcacaacagcctgcacgctgctgatgtagcccagtcgacccatgttctcctttctacaccagcattagacgctgtcttcacagatttggagatcctggctgccatttttgcagctgccatccatgacgttgatcatcctggagtctccaatcagtttctcatcaacacaaattcagaacttgctttgatgtataatgatgaatctgtgttggaaaatcatcaccttgctgtgggtttcaaactgctgcaagaagaacactgtgacatcttcatgaatctcaccaagaagcagcgtcagacactcaggaagatggttattgacatggtgttagcaactgatatgtctaaacatatgagcctgctggcagacctgaagacaatggtagaaacgaagaaagttacaagttcaggcgttcttctcctagacaactataccgatcgcattcaggtccttcgcaacatggtacactgtgcagacctgagcaaccccaccaagtccttggaattgtatcggcaatggacagaccgcatcatggaggaatttttccagcagggagacaaagagcgggagaggggaatggaaattagcccaatgtgtgataaacacacagcttctgtggaaaaatcccaggttggtttcatcgactacattgtccatccattgtgggagacatgggcagatttggtacagcctgatgctcaggacattctcgataccttagaagataacaggaactggtatcagagcatgatacctcaaagtccctcaccaccactggacgagcagaacagggactgccagggtctgatggagaagtttcagtttgaactgactctcgatgaggaagattctgaaggacctgagaaggagggagagggacacagctatttcagcagcacaaagacgctttgtgtgattgatccagaaaacagagattccctgggagagactgacatagacattgcaacagaagacaagtcccccgtggatacataatccccctctccctgtggagatgaacattctatccttgatgagcatgccagctatgtggtagggccagcccaccatgggggccaagacctgcacaggacaagggccacctggcctttcagttacttgagtttggagtcagaaagcaagaccaggaagcaaatagcagctcaggaaatcccacggttgacttgccttgatggcaagcttggtggagagggctgaagctgttgctgggggccgattctgatcaagacacatggcttgaaaatggaagacacaaaactgagagatcattctgcactaagtttcgggaacttatccccgacagtgactgaactcactgactaataacttcatttatgaatcttctcacttgtccctttgtctgccaacctgtgtgccttttttgtaaaacattttcatgtctttaaaatgcctgttgaatacctggagtttagtatcaacttctacacagataagctttcaaagttgacaaacttttttgactctttctggaaaagggaaagaaaatagtcttccttctttcttgggcaatatccttcactttactacagttacttttgcaaacagacagaaaggatacacttctaaccacattttacttccttcccctgttgtccagtccaactccacagtcactcttaaaacttctctctgtttgcctgcctccaacagtacttttaactttttgctgtaaacagaataaaattgaacaaattagggggtagaaaggagcagtggtgtcgttcaccgtgagagtctgcatagaactcagcagtgtgccctgctgtgtcttggaccctgccccccacaggagttgctacagtccctggccctgcttcccatcctcctctcttcaccccgttagctgttttcaatgtaatgctgccgtccttctcttgcactgccttctgcgctaacacctccattcctgtttataaccgtgtatttattacttaatgtatataatgtaatgttttgtaagttattaatttatatatctaacattgcctgccaatggtggtgttaaatttgtgtagaaaactctgcctaagagttacgactttttcttgtaatgttttgtattgtgtattatataacccaaacgtcacttagtagagacatatggcccccttggcagagaggacaggggtgggcttttgttcaaagggtctgccctttccctgcctgagttgctacttctgcacaacccctttatgaaccagttttggaaacaatattctcacattagatactaaatggtttatactgagtcttttacttttgtatagcttgataggggcaggggcaatgggatgtagtttttacccaggttctatccaaatctatgtgggcatgagttgggttataactggatcctactatcattgtggctttggttcaaaaggaaacactacatttgctcacagatgattcttctgattcttctgaatgctcccgaactactgactttgaagaggtagcctcctgcctgccattaagcaggaatgtcatgttccagttcattacaaaagaaaacaataaaacaatgtgaatttttataataaaaaaaaaaaaaaggaattc

SEQ ID NO: 371 - protein, 1247 aa, Homo sapiens
MLASSSRIRAAWTRALLLPLLLAGPVGCLSRQELFPFGPGQGDLELEDGDDFVSPALELSGALRFYDRSDIDAVYVTTNGIIATSEPPAKESHPGLFPPTFGAVAPFLADLDTTDGLGKVYYREDLSPSITQRAAECVHRGFPEISFQPSSAVVVTWESVAPYQGPSRDPDQKGKRNTFQAVLASSDSSSYAIFLYPEDGLQFHTTFSKKENNQVPAVVAFSQGSVGFLWKSNGAYNIFANDRESIENLAKSSNSGQQGVWVFEIGSPATTNGVVPADVILGTEDGAEYDDEDEDYDLATTRLGLEDVGTTPFSYKALRRGGADTYSVPSVLSPRRAATERPLGPPTERTRSFQLAVETFHQQHPQVIDVDEVEETGVVFSYNTDSRQTCANNRHQCSVHAECRDYATGFCCSCVAGYTGNGRQCVAEGSPQRVNGKVKGRIFVGSSQVPIVFENTDLHSYVVMNHGRSYTAISTIPETVGYSLLPLAPVGGIIGWMFAVEQDGFKNGFSITGGEFTRQAEVTFVGHPGNLVIKQRFSGIDEHGHLTIDTELEGRVPQIPFGSSVHIEPYTELYHYSTSVITSSSTREYTVTEPERDGASPSRIYTYQWRQTITFQECVHDDSRPALPSTQQLSVDSVFVLYNQEEKILRYAFSNSIGPVREGSPDALQNPCYIGTHGCDTNAACRPGPRTQFTCECSIGFRGDGRTCYDIDECSEQPSVCGSHTICNNHPGTFRCECVEGYQFSDEGTCVAVVDQRPINYCETGLHNCDIPQRAQCIYTGGSSYTCSCLPGFSGDGQACQDVDECQPSRCHPDAFCYNTPGSFTCQCKPGYQGDGFRCVPGEVEKTRCQHEREHILGAAGATDPQRPIPPGLFVPECDAHGHYAPTQCHGSTGYCWCVDRDGREVEGTRTRPGMTPPCLSTVAPPIHQGPAVPTAVIPLPPGTHLLFAQTGKIERLPLEGNTMRKTEAKAFLHVPAKVIIGLAFDCVDKMVYWTDITEPSIGRASLHGGEPTTIIRQDLGSPEGIAVDHLGRNIFWTDSNLDRIEVAKLDGTQRRVLFETDLVNPRGIVTDSVRGNLYWTDWNRDNPKIETSYMDGTNRRILVQDDLGLPNGLHFDAFSSQLCWVDAGTNRAECLNPSQPSRRKALEGLQYPFAVTSYGKNLYFTDWKMNSVVALDLAISKETDAFQPHKQTRLYGITTALSQCPQGHNYCSVNNGGCTHLCLATPGSRTCRCPDNTLGVDCIERK

SEQ ID NO: 372 - DNA, 4898 bp, Homo sapiens
gaattccggctgccaggggcgtccggttacatccccgccttcctctgtcctggccgcgggaccgggtttgcgggaccgcagttcgggaacatgttggcctcgagcagccggatccgggctgcgtggacgcgggcgctgctgctgccgctgctgctggcggggcctgtgggctgcctgagccgccaggagctctttcccttcggccccggacagggggacctggagctggaggacggggatgacttcgtctctcctgccctggagctgagtggggcgctccgcttctacgacagatccgacatcgacgcagtctacgtcaccacaaatggcatcattgctacgagtgaacccccggccaaagaatcccatcccgggctcttcccaccaacattcggtgcagtcgcccctttcctggcggacttggacacgaccgatggcctggggaaggtttattatcgagaagacttatccccctccatcactcagcgagcagcagagtgtgtccacagagggttcccggagatctctttccagcctagtagcgcggtggttgtcacttgggaatccgtggccccctaccaagggcccagcagggacccagaccagaaaggcaagagaaacacgttccaggctgttctagcctcctctgattccagctcctatgccattttcctttatcctgaggatggtctgcagttccatacgacattctcaaagaaggaaaacaaccaagttcctgccgtggttgcattcagtcaaggttcagtgggattcttatggaagagcaacggagcttataacatatttgctaatgacagggaatcaattgaaaatttggccaagagtagtaactctgggcagcagggtgtctgggtgtttgagattgggagtccagccaccaccaatggcgtggtgcctgcagacgtgatcctcggaactgaagatggggcagagtatgatgatgaggatgaagattatgacctggcgaccactcgtctgggcctggaggatgtgggcaccacgcccttctcctacaaggctctgagaaggggaggtgctgacacatacagtgtgcccagcgtcctctccccgcgccgggcagctaccgaaaggccccttggacctcccacagagagaaccaggtctttccagttggcagtggagacttttcaccagcagcaccctcaggtcatagatgtggatgaagttgaggaaacaggagttgttttcagctataacacggattcccgccagacgtgtgctaacaacagacaccagtgctcggtgcacgcagagtgcagggactacgccacgggcttctgctgcagctgtgtcgctggctatacgggcaatggcaggcaatgtgttgcagaaggttccccccagcgagtcaatggcaaggtgaaaggaaggatctttgtggggagcagccaggtccccattgtctttgagaacactgacctccactcttacgtagtaatgaaccacgggcgctcctacacagccatcagcaccattcccgagaccgttggatattctctgcttccactggccccagttggaggcatcattggatggatgtttgcagtggagcaggacggattcaagaatgggttcagcatcaccgggggtgagttcactcgccaggctgaggtgaccttcgtggggcacccgggcaatctggtcattaagcagcggttcagcggcatcgatgagcatgggcacctgaccatcgacacggagctggagggccgcgtgccgcagattccgttcggctcctccgtgcacattgagccctacacggagctgtaccactactccacctcagtgatcacttcctcctccacccgggagtacacggtgactgagcccgagcgagatggggcatctccttcacgcatctacacttaccagtggcgccagaccatcaccttccaggaatgcgtccacgatgactcccggccagccctgcccagcacccagcagctctcggtggacagcgtgttcgtcctgtacaaccaggaggagaagatcttgcgctacgctttcagcaactccattgggcctgtgagggaaggctcccctgatgctcttcagaatccctgctacatcggcactcatgggtgtgacaccaacgcggcctgtcgccctggtcccaggacacagttcacctgcgagtgctccatcggcttccgaggagacgggcgaacctgctatgatattgatgaatgttcagaacaaccctcagtgtgtgggagccacacaatctgcaataatcacccaggaaccttccgctgcgagtgtgtggagggctaccagttttcagatgagggaacgtgtgtggctgtcgtggaccagcgccccatcaactactgtgaaactggccttcataactgcgacataccccagcgggcccagtgtatctacacaggaggctcctcctacacctgttcctgcttgccaggcttttctggggatggccaagcctgccaagatgtagatgaatgccagccaagccgatgtcaccctgacgccttctgctacaacactccaggctctttcacgtgccagtgcaaacctggttatcagggagacggcttccgttgcgtgcccggagaggtggagaaaacccggtgccagcacgagcgagaacacattctcggggcagcgggggcgacagacccacagcgacccattcctccggggctgttcgttcctgagtgcgatgcgcacgggcactacgcgcccacccagtgccacggcagcaccggctactgctggtgcgtggatcgcgacggccgcgaggtggagggcaccaggaccaggcccgggatgacgcccccgtgtctgagtacagtggctcccccgattcaccaaggacctgcggtgcctaccgccgtgatccccttgcctcctgggacccatttactctttgcccagactgggaagattgagcgcctgcccctggagggaaataccatgaggaagacagaagcaaaggcgttccttcatgtcccggctaaagtcatcattggactggcctttgactgcgtggacaagatggtttactggacggacatcactgagccttccattgggagagctagtctacatggtggagagccaaccaccatcattagacaagatcttggaagtccagaaggtatcgctgttgatcaccttggccgcaacatcttctggacagactctaacctggatcgaatagaagtggcgaagctggacggcacgcagcgccgggtgctctttgagactgacctggtgaatcccagaggcattgtaacggattccgtgagagggaacctttactggacagactggaacagagataaccccaagattgaaacttcctacatggacggcacgaaccggaggatccttgtgcaggatgacctgggcttgcccaatggactgcacttcgatgcgttctcatctcagctctgctgggtggatgcaggcaccaatcgggcggaatgcctgaaccccagtcagcccagcagacgcaaggctctcgaagggctccagtatccttttgctgtgacgagctacgggaagaatctgtatttcacagactggaagatgaattccgtggttgctctcgatcttgcaatttccaaggagacggatgctttccaaccccacaagcagacccggctgtatggcatcaccacggccctgtctcagtgtccgcaaggccataactactgctcagtgaacaatggcggctgcacccacctatgcttggccaccccagggagcaggacctgccgttgccctgacaacaccttgggagttgactgtatcgaacggaaatgaagacaagagtgccttatttcctttccaagtatttcacagcaacactctacttgaagcaacttggtccagattgaaaagtgtcctctggctgagtggccactaggcccagacccagcccagcctgagccccaacaacaacttttccctcactgttccccaaaacatgcaccctggacttctctaatagaaaagtctccacccctacacaaggacagaaccctccacccctacccccaaccctcagacagacttatacacccctgagtgaggattacatgcccatcccagtgtcctaggaccttttcccaatactagccccccagtggtgaacagaacctcccaaatttgagttgcacccttccctgtggccttatgagctcagcctcgctttgaggtacccaccgtcctgtcagctccttgacctatgagctggggcctgactaggaaaagttgggagttaaggaggaaattagcattccttaatgttttgttttggtgctctgaatttcttctttattatagtcctatagttttactcctcagttcctcaccatcatcatcttgtctaagacccccattataatattcatgcgctgctttttcatcaaaacctaccctgtcctagagatctatgggcatttggtggatgataatgagcagcccctcccagatagaatgtcaatatttgagcagtaggatattggcatttgttagttaaaggcttaaatcaaaagaatgtccaatggtaggaatttcaaggtgtaggtcagatatttgagaataggggatttttttgatgtgccttaaattataccaaagattactaattattcctctttgcccaaaatacttgcatccaaggttctagtctctgttgctgtgctggtctttagccccactgctggcactgatgtccctcctttttcacggagacctatctgaggtacaggatggggctggcaccagatgatgtcccaccacagtccctcacctccggcctccacatgacagaaccaatttacactcaaccatgacctcacccctccttggtttctccctccccg

SEQ ID NO: 373 - protein, 340 aa, Homo sapiens
MVTRRRPLEPSGGGRRELGRGPGPPLPERGAGRRARPGSGCERPPAPRPRAPRAAPPRAWLAGGRACGRPPRRAPMDGPAIITQVTNPKEDEGRLPGAGEKASQCNVSLKKQRSRSILSSFFCCFRDYNVEAPPPSSPSVLPPLVEENGGLQKPPAKYLLPEVTVLDYGKKCVVIDLDETLVHSSFKPISNADFIVPVEIDGTIHQVYVLKRPHVDEFLQRMGQLFECVLFTASLAKYADPVADLLDRWGVFRARLFRESCVFHRGNYVKDLSRLGRELSKVIIVDNSPASYIFHPENAVPVQSWFDDMTDTELLDLIPFFEGLSREDDVYSMLHRLCNR

SEQ ID NO: 374 - DNA, 4763 bp, Homo sapiens
  misc_feature (3847)..(3847): n = a, c, g, or t
cccctcaccccactcaactgccccgggcccccgcgcgcgcggccgcccctccactcaccctgtgtcggccccgctcccctctcccccaccaggcgagcaggcgagcgggcagagcccgcggcggaggtcggcgcggctccggggttcatggtgacgaggcggcggccgctcgagcccagcggcggcgggcggcgggagctggggcgcgggcccgggccgcctctcccagagcgcggggccgggcggcgggcgcgcccaggcagcggctgcgagcgcccccccgcgccgcgcccccgcgccccccgcgccgcgcccccgcgcgcttggcttgcggggggccgggcctgcgggcggccgccgcgccgcgcacccatggacggcccggccatcatcacccaggtgaccaaccccaaggaggacgagggccggttgccgggcgcgggcgagaaagcctcccagtgcaacgtcagcttaaagaagcagaggagccgcagcatccttagctccttcttctgctgcttccgtgattacaatgtggaggcccctccacccagcagccccagtgtgcttccgccactggtggaggagaatggtgggcttcagaagccaccagctaagtaccttcttccagaggtgacggtgcttgactatggaaagaaatgtgtggtcattgatttagatgaaacattggtgcacagttcgtttaagcctattagtaatgctgattttattgttccggttgaaatcgatggaactatacatcaggtgtatgtgctgaagcggccacatgtggacgagttcctccagaggatggggcagctttttgaatgtgtgctctttactgccagcttggccaagtatgcagaccctgtggctgacctcctagaccgctggggtgtgttccgggcccggctcttcagagaatcatgtgtttttcatcgtgggaactacgtgaaggacctgagtcgccttgggcgggagctgagcaaagtgatcattgttgacaattcccctgcctcatacatcttccatcctgagaatgcagtgcctgtgcagtcctggttcgatgacatgacggacacggagctgctggacctcatccccttctttgagggcctgagccgggaggacgacgtgtacagcatgctgcacagactctgcaataggtagccctggcctctgcctgcctcccgcctgtgcactctggaacctctggcctcaggggacctgcctgtcctcagctccctgggagctgaaagtgaggatactccgtgctccaggccacagggtgaatgtggccatgcctacctgttttgtttttttaagaacagaaacaactattttaaaagaactcttttaagaaatttcataaagggacatgcattttactgggtttgcttttcttaaaacataccaaaaaagaaaaaaatagaaaaaaaaaaaaaaaaagctgatctctatcagactcttcaactgtcctccctccaagcagaccacctgtccccttctatcccagctcagagcagctgacccaactcagaatctctttcctacaggatgaaagtgccttttgaatgttatttttaagccgagagttaatttttctacacaacatatttccagacatcttttagtcttttattgtcttagatactataagaagatgaacatgacaattttctagaacctggtagcgtgtgtgtgtggttggcggggggtgctgagggaggggagtgagtcacaggagcctgtcccccaacaggtgtgactgctctgacaacctgtggcatgctgcagggtcaggctcctgataggaggatttcatgactatgtcattgtctccactcatttttgacccagtttggaatgtatctgcaattgtgtggctcaacactttaggaaacatagattattttatattattatttctgatggtgacaagtttgtcttgaggtcacattttctccttgaaaagtgacatcctgtcacttctgctctcacactactgccatacatttgtgtttttttgttgttattgtttgggtagagcagttacaagaaaccctaaaacccttggatataaaagaaatctgtttattgatttttaaatctttcctttccaaaagctggatacacatggagctgtttgggaattttccttgctgctaccgcgctgccaccaaatggaattgaccagcggctgttacactgttctttgccactgtgcctatgctcagaatatgctcactgctaagctacaaactcggacagggtcagaaacagaggtgtcccatcccattgcagcctccaccacctgtaaccccttcctggcattggccactgaagggtacaaaggcaaaaggaccacagcaccacttaggtgtagcatggattttaaactgcagtcagtatcagatcctgtttgataaataagctgactgttctctcttgagaacctgtggcctcaaccagccaccaagctgatgtggcccaagctccatctcttggtcttctcctttgaagcacagcctatttctgagccaagggttggggaagcctgtctagatgtgggactcattgccccaaaccagggagaggaagagctcccacagggagagcccaggctctctttgcagcctttcccagtttggtgtttaaagcagtgccatgttccttgtttgacaacaagacagtctgtaaagtattgctcttaaaaacaattaaaaagaaccctttcatattggcaccattgccttagtcctctgtgggttggtcttcagccagcattctggtgggagtgactggcattaacaagactggaaatcgggggtcaaagtaaaatatctttgttttgctttcattcacaaagtaatgaagccagctgccaattacatcctcccaacagcactttggtctgtgactgctgtgtgatattcagaagggaagtagtattcagggggtaaacaggtctcccagcattctgagtgttccaaaccagtaatccacatgccaattcaaatagaacagccccttgctagatattaccacagataatgacagtacatggtagaactgcccatgccacaaatatttatttggaaaagtagtcattaaatgaacccactgccttaaatgtcttgaatgttgcagtcaagtgtctgtcatgtgttgatatccacacagaattaggccctaatgagagccttagaccctcaaccatgcccccttcgttggcatcacagggccttatttggaagagcggggcaaagaggatggaaatcataaaatatttcatgggaatcgaacctagggatagtgctccacttctgacgatggagtgaagacacttggcagacttgagccagacacttcacctagtagttcctgaaactgtgagcaccactgcactaagccagtgcggagctgttagggacgggcccagctcctgcacacggacacagaatgtctggagagggcagcaggcctctgagggttctggaatctgtgccaccttatttgaccacactccaaaattctgtttttattttaacccttgaatctgctttatgtacataatcaaaatatctatatctatatctatatctatatctatatatttttaatcatctacatgtaaatgaagcaatagaattctaacataaggccaagaaatgagacgaatgtttggggtttatgttttttaaggtaaatacgggtattgtttttaattattaccatgtattaaattgtgggctttgaaacctaatgaaacctgttagccacttctctgtgccatatacttcccatgttaccaaaatacgcccaactctttagccaaaagagaacnctgacctcctgagtttccatgctcctttctgtcaggtttaaatgtagtcttctggagaagtatttttgacattgagctctgggacaggacaccttgggtttgtggactgcagcccactatgatgttattacttctctggccaggcctccagtggaagtgcacaggcactcccaatgttgttaatgctctgtcttccatttgttctggaatcctacgtgttggtctgtggttccatgcattagctgtttgtaaataatgcatttgcatactgaaaaaggaatgccacctgccacagttgatggtgagaagctcctttgacgtggtgcaattttgatgagatgtctctggggacacgaggatgccctaatgatgctgacttgtcatggttgcagcatttgaacttttggtgttaaaaaaaaaaacctgtaagtctgtaacctggcaacattttacaaccctgtatttttaaagatggctttctaataaaaaatccagaaccacacagccctatggtcaaacaatcctacgtttgtgcctctgcttttaaaggtgctgtgctggacagttggcatgccagggttcgagaagagtgaatggcttgacgtccttgcagttaactgtgcaaaattggctggctgcctctgttcctactgtactgtaactttgatcatgtctgttcctattccattctcccaggagcttctctgcagactgacacaccctcccccaccccgggtagtggagatgctggtgtctgggtagtcatggatttctgctgacatttgaatgtgataaacaatccagcattacttaggaaatgctacatgcggaatgtgcacgtttccaggggcgagtattgtcaatcaaaaggtttgcaatgatttccttcctgccaaaaataaacatgtgaaactgc

SEQ ID NO: 375 - protein, 289 aa, Homo sapiens
MFDKTRLPYVALDVLCVLLAGLPFAIFTSRHITSRHTPFQRGVFCNDESIKYPYKEDTIPYALLGGIIIPFSIIVIILGETLSVYCNLLHSNSFIRNNYIATIYKAIGTFLFGAAASQSLTDIAKYSIGRLRPHFLDVCDPDWSKINCSDGYIEYYICRGNAERVKEGRLSFYSGHSSFSMYCMLFVALYLQARMKGDWARLLRPTLQFGLVAVSIYVGLSRVSDYKHHWSDVLTGLIQGALVAILVAVYVSDFFKERTSFKERKEEDSHTTLHETPTTGNHYPSNHQP

SEQ ID NO: 376 - DNA, 1043 bp, Homo sapiens
cccggcccgggctcgagaatcaagggcctcggccgccgtcccgcagctcagtccatcgcccttgccgggcagcccgggcagagaccatgtttgacaagacgcggctgccgtacgtggccctcgatgtgctctgcgtgttgctggctggattgccttttgcaatttttacttcaaggcatattacttcaaggcatacccccttccaacgaggagtattctgtaatgatgagtccatcaagtacccttacaaagaagacaccataccttatgcgttattaggtggaataatcattccattcagtattatcgttattattcttggagaaaccctgtctgtttactgtaaccttttgcactcaaattcctttatcaggaataactacatagccactatttacaaagccattggaacctttttatttggtgcagctgctagtcagtccctgactgacattgccaagtattcaataggcagactgcggcctcacttcttggatgtttgtgatccagattggtcaaaaatcaactgcagcgatggttacattgaatactacatatgtcgagggaatgcagaaagagttaaggaaggcaggttgtccttctattcaggccactcttcgttttccatgtactgcatgctgtttgtggcactttatcttcaagccaggatgaagggagactgggcaagactcttacgccccacactgcaatttggtcttgttgccgtatccatttatgtgggcctttctcgagtttctgattataaacaccactggagcgatgtgttgactggactcattcagggagctctggttgcaatattagttgctgtatatgtatcggatttcttcaaagaaagaacttcttttaaagaaagaaaagaggaggactctcatacaactctgcatgaaacaccaacaactgggaatcactatccgagcaatcaccagccttgaaaggcagcagggtgcccaggtgaagctggcctgttttctaaaggaaaatgattgccacaaggcaagaggatgcatctttcttcctgg

SEQ ID NO: 377 - protein, 632 aa, Homo sapiens
MSRVRDAGCVAAGIVIGAGAWYCVYKYTRGRDQTKKRMAKPKNRAVAGTGARARAGLRAGFTIDLGSGFSPPTPVRAEAEDRAQDEASALDTVGAEAVAPAASSAEAQSGAGSQAQEADGAGVGPKAESVVGAAMASAIAPPPGVTEALGAAEAPAMAGAPKVAEAPREAETSRAAVPPGTVVPTEAAAPTEVTEGPGVAAPTKVAEAPGVASPTEAAEAPVPATPTGAAAPTGAAESPGTSGSPRTAVVPGTSAAKKATPGAHTGAIPKATSATGAVPKGGGKGVTRSRNGGKGKGKKSKVEVDELGMGFRPGDGAAAAAAASANGGQAFLAEVPDSEEGESGWTDTESDSDSEPETQRRGRGRRPVAMQKRPFPYEIDEILGVRDLRKVLALLQKSDDPFIQQVALLTLSNNANYSCNQETIRKLGGLPIIANMINKTDPHIKEKALMAMNNLSENYENQGRLQVYMNKVMDDIMASNLNSAVQVVGLKFLTNMTITNDYQHLLVNSIANFFRLLSQGGGKIKVEILKILSNFAENPDMLKKLLSTQVPASFSSLYNSYVESEILINALTLFEIIYDNLRAEVFNYREFNKGSLFYLCTTSGVCVKKIRALANHHDLLVKVKVIKLVNKF

SEQ ID NO: 378 - DNA, 2788 bp, Homo sapiens
gggtgggtaccaactctattgcgcagctcgctgccgtgcgtttaacccaggcgaggaggaggaggagaaaattcccccagattcgggcagacacctccggcccacacagccgttcaccccccgtcttttcagtcctggaaaaggaattcgggctttcattgtctaacgtcgacagtctatatttctgctcttcagtctgtccttaggatgaagctctaactgaactgaagtaaggagaaacagccttgaatctttggagggtctgtcttccttttgggctctgtgcaactgcagctacagtggaaaaaagcaaactgctcttgatcccaggccctgcctaagcctcagcagaacttgtaagcctaaactgaagagcctcacccggacgagcaggcatcccttaaccttaagcaatccagttccacgccctggatcagtgaataaccccagctgcaccatgagccgcgttcgggatgctggctgtgtagcggcggggatagtgataggggctggtgcctggtactgtgtctacaaatacaccagggggagagaccagaccaagaagagaatggccaagcccaaaaaccgggctgtggctgggactggagccagggctagagctgggctaagagccggattcacaatcgaccttgggtcaggattcagtcccccaaccccagtccgtgctgaagcagaggacagggcccaggatgaagcctctgctctggacacagttggagctgaggcagtggccccagctgcatccagcgctgaggctcagagtggggcaggcagtcaggcccaagaggcagatggagccggggttgggcctaaggccgaatcagtagttggggctgcaatggcttctgcaatagcaccacctcccggggtgacagaggcccttggggctgcagaagcccctgcaatggcaggggctcccaaagtggcagaagctcccagagaagcggagacttccagggcagcggtgcctcctgggacagtggtgcctaccgaagcggcagcacccactgaggtgaccgagggtcctggggtagcagcacctaccaaggtagctgaagctcccggggtggcatcgcctaccgaggcagctgaggctcctgtgcccgcaacgcctactggggctgcagcacctactggggctgcagagtctcctggaacttctggttcccctagaacagcggtggttcctggaacatcagctgccaagaaagcaacccctggggctcacactggggctataccgaaagccacatcagcgactggagcggtacccaaaggtggaggcaagggtgtaaccaggtcccggaatgggggcaagggcaagggcaagaaaagcaaagttgaagtagacgaactggggatgggcttccgtcctggagatggggctgcagcagctgctgcagcctctgctaatggcggacaggctttcctggcagaggtccctgattctgaggaaggggagtccgggtggactgacacagagtcagattcagactctgagcccgagacccagcgcagagggaggggaagaagacccgttgccatgcagaagcgcccctttccttatgaaattgatgagattctgggtgtccgcgatctcaggaaggtccttgccttgcttcagaaatctgatgatcctttcatccaacaggtagctttgctcactctgagcaacaatgccaattattcatgcaatcaagagacaatccgcaaattgggaggcctcccaattattgcaaacatgatcaacaaaactgatccacacattaaggaaaaagccttaatggccatgaataacctgagtgagaattatgaaaatcagggccggcttcaggtgtacatgaataaagtgatggatgatatcatggcctctaacctgaactcagcagttcaagtagttggactaaaatttctaacaaacatgactattactaatgactaccaacacctgcttgtcaattccattgcaaactttttccgtttgctatctcagggaggtggaaaaatcaaggttgagattttgaaaatcctttcgaattttgctgaaaatccagatatgttgaagaaacttctcagtacccaagtgccagcatcatttagttccctctataattcttacgtggaatcagaaatccttattaatgcccttactctatttgagattatctatgacaatctcagagcagaagtgtttaactatagagaattcaataaaggttcccttttttacttatgcactacatctggagtgtgtgttaagaaaattagagccttagcaaatcaccatgacctcttagtgaaagtgaaagttataaaactagtgaacaaattctgattggttatgtaccgtcaaaagacttgaagaaatttcatgattttgcagtgtggaagcgttgaaaattgaaagttactgcttttccacttgctcatatagtaaagggatcctttcagctgccagtgttgaataatgtatcatccagagtgatgttatctgtgacagtcaccagctttaagctgaaccattttatgaataccaaataaatagacctcttgtactgaaaacatatttgtgactttaatcgtgctgcttggatagaaatatttttactcgttcttctgaattgacagtaaacctgtccattatgaatggcctactgttctattatttgttttgacttgaatttatccaccaaagacttcatttgtgtatcatcaataaagttgtatgtttcaacttaaaaaaaaaaaaaaaaaaaaaaaaaaaaaa

SEQ ID NO: 379 - protein, 343 aa, Homo sapiens
MWPNGSSLGPCFRPTNITLEERRLIASPWFAASFCVVGLASNLLALSVLAGARQGGSHTRSSFLTFLCGLVLTDFLGLLVTGTIVVSQHAALFEWHAVDPGCRLCRFMGVVMIFFGLSPLLLGAAMASERYLGITRPFSRPAVASQRRAWATVGLVWAAALALGLLPLLGVGRYTVQYPGSWCFLTLGAESGDVAFGLLFSMLGGLSVGLSFLLNTVSVATLCHVYHGQEAAQQRPRDSEVEMMAQLLGIMVVASVCWLPLLVFIAQTVLRNPPAMSPAGQLSRTTEKELLIYLRVATWNQILDPWVYILFRRAVLRRLQPRLSTRPRSLSLQPQLTQRSGLQ

SEQ ID NO: 380 - DNA, 1323 bp, Homo sapiens
atccagccaggtgggagccccgcagatgaggtctctgaaggtgtgcctgaaccagtgccaacctgccctgtctgcagcatcggcctgatggggtggtgactgatccctcagggctccggagccatgtggcccaacggcagttccctggggccctgtttccggcccacaaacattaccctggaggagagacggctgatcgcctcgccctggttcgccgcctccttctgcgtggtgggcctggcctccaacctgctggccctgagcgtgctggcgggcgcgcggcaggggggttcgcacacgcgctcctccttcctcaccttcctctgcggcctggtcctcaccgacttcctggggctgctggtgaccggtaccatcgtggtgtcccagcacgccgcgctcttcgagtggcacgccgtggaccctggctgccgtctctgtcgcttcatgggcgtcgtcatgatcttcttcggcctgtccccgctgctgctgggggccgccatggcctcagagcgctacctgggtatcacccggcccttctcgcgcccggcggtcgcctcgcagcgccgcgcctgggccaccgtggggctggtgtgggcggccgcgctggcgctgggcctgctgcccctgctgggcgtgggtcgctacaccgtgcaatacccggggtcctggtgcttcctgacgctgggcgccgagtccggggacgtggccttcgggctgctcttctccatgctgggcggcctctcggtcgggctgtccttcctgctgaacacggtcagcgtggccaccctgtgccacgtctaccacgggcaggaggcggcccagcagcgtccccgggactccgaggtggagatgatggctcagctcctggggatcatggtggtggccagcgtgtgttggctgccccttctggtcttcattgcccagacagtgctgcgaaacccgcctgccatgagccccgccgggcagctgtcccgcaccacggagaaggagctgctcatctacttgcgcgtggccacctggaaccagatcctggacccctgggtgtatatcctgttccgccgcgccgtgctccggcgtctccagcctcgcctcagcacccggcccaggtcgctgtccctccagccccagctcacgcagcgctccgggctgcagtaggaagtggacagagcgcccctcccgcgcctttccgcggagcccttggcccctcggacagcccatctgcctgttctgaggattcaggggctgggggtgctggatggacagtgggcatcagcagcagggttttgggttgaccccaatccaacccggggacccccaactcct

SEQ ID NO: 381 - protein, 74 aa, Homo sapiens
MLGLVLALLSSSSAEEYVGLSANQCAVPAKDRVDCGYPHVTPKECNNRGCCFDSRIPGVPWCFKPLTRKTECTF

SEQ ID NO: 382 - DNA, 398 bp, Homo sapiens
gatgctggggctggtcctggccttgctgtcctccagctctgctgaggagtacgtgggcctgtctgcaaaccagtgtgccgtgccggccaaggacagggtggactgcggctacccccatgtcacccccaaggagtgcaacaaccggggctgctgctttgactccaggatccctggagtgccttggtgtttcaagcccctgactaggaagacagaatgcaccttctgaggcacctccagctgcccctgggatgcaggctgagcacccttgcccggctgtgattgctgccaggcactgttcatctcagtttttctgtccctttgctcccggcaagctttctgctgaaagttcatatctggagcctgatgtcttaacgaataaaggtcccatgctccacccg

SEQ ID NO: 383 - protein, 720 aa, Homo sapiens
MDDPKKEDILLLADEKFDFDLSLSSSSANEDDEVFFGPFGHKERCIAASLELNNPVPEQPPLPTSESPFAWSPLAGEKFVEVYKEAHLLALHIESSSRNQAAQAAKPEDPRSQGVERFIQESKLKINLFEKEKEMKKSPTSLKRETYYLSDSPLLGPPVGEPRLLASSPALPSSGAQARLTRAPGPPHSAHALPRESCTAHAASQAATQRKPGTKLLLPRAASVRGRSIPGAAEKPKKEIPASPSRTKIPAEKESHRDVLPDKPAPGAVNVPAAGSHLGQGKRAIPVPNKLGLKKTLLKAPGSTSNLARKSSSGPVWSGASSACTSPAVGKAKSSEFASIPANSSRPLSNISKSGRMGPAMLRPALPAGPVGASSWQAKRVDVSELAAEQLTAPPSASPTQPQTPEGGGQWLNSSCAWSESSQLNKTRSIRRRDSCLNSKTKVMPTPTNQFKIPKFSIGDSPDSSTPKLSRAQRPQSCTSVGRVTVHSTPVRRSSGPAPQSLLSARRVSALPTPASRRCSGLPPMTPKTMPRAVGSPLCVPARRRSSEPRKNSAMRTEPTRESNRKTDSRLVDVSPDRGSPPSRVPQALNFSPEESDSTFSKSTATEVAREEAKPGGDAAPSEALLVDIKLEPLAVTPDAASQPLIDLPLIDFCDTPEAHVAVGSESRPLIDLMTNTPDMNKNVAKPSPVVGQLIDLSSPLIQLSPEADKENVDSPLLKF

SEQ ID NO: 384 - DNA, 2917 bp, Homo sapiens
ggcacgagggcggcggccgcgatgagccttcagcctgccgggcaggggacgtgaacatggatgaccctaagaaggaagacattcttcttttggccgatgaaaaatttgacttcgatctttcattgtcttcttcgagtgcaaatgaagatgatgaagtcttcttcggaccctttggacataaagaaagatgtattgctgccagcttggaattaaataatccggttcccgaacagcctccgttgcccacatctgagagtccctttgcctggagccctctggccggggagaagttcgtggaggtgtacaaagaagctcacttactggctttacacattgagagcagcagccggaaccaggcagcccaagctgccaagcctgaagaccctcggagccagggcgtggaaagattcatacaggagtcaaaattaaaaataaacctctttgagaaagaaaaggaaatgaagaaaagccccacgtctcttaaaagggagacatactacctgtcagacagccccttgctggggccccctgtgggtgagcctcggctcttggcctcctccccggccctgcccagctctggtgcccaggcccgcctcacccgggcgccggggcctccgcactctgctcatgctttgcccagggaatcatgcactgctcatgctgcaagtcaggcagcgactcagaggaagcccgggaccaaattgctgctgcctcgagcggcctctgttagaggaagaagcatccctggggctgcggagaagcccaagaaagagattccagctagtccttccaggacaaaaatcccagctgagaaggaatcccaccgggatgttctccctgacaaacctgccccgggtgctgtcaatgtgccggccgccggaagccacttgggccagggcaagcgggcgatccctgttccaaacaagttggggctgaagaagaccctgttaaaagcacccggctctaccagcaatctcgcaaggaagtcctcctcggggcctgtttggagcggggcatccagtgcgtgcacatccccagcagtgggcaaagctaaatcaagtgaatttgcaagtattcctgcaaatagctcccggcctctgtcaaacatcagcaagtcaggcagaatgggacccgccatgctgcggccagctctgcctgcaggccctgtgggggcatcctcctggcaggccaagcgggtcgatgtttctgagctggcagcggagcagctcacggcacccccctcagcatcccccacccaaccccagactccggaaggtggcggccagtggctgaactccagttgcgcttggtcagaatcttctcaattgaataagactagaagtatcagacggcgagattcctgtctaaattccaagacaaaggttatgcctactcctacaaatcaatttaaaattcctaagttttctattggtgactccccggacagctcaacaccaaagctttcgcgggcacagcggccgcagtcgtgcacgtcagttggcagggtcactgtccacagcaccccggttagacgctcatctgggccagcaccacaaagcctgctgagcgcacggcgtgtgtcagccttgcccacacccgccagccggcgctgctctggccttccaccgatgacccccaaaacgatgcccagggccgtgggctctcccctgtgtgtgccagctcggagacgttcctctgagccccgcaagaactctgcaatgagaactgaaccaacaagggagagcaacagaaagacagattccaggctggtggatgtgtcccctgacaggggttctcctccttcccgtgtgcctcaggcacttaacttttctccagaggaaagcgattctactttctccaaaagtactgccacagaagtagctcgggaggaagccaagccgggtggagatgcagcccctagtgaggctcttcttgtagatatcaaactggaaccactcgcggtcactccagatgctgcaagccagcccctcattgaccttcctctcatcgacttctgcgataccccagaagcacacgtggctgtaggatctgaaagcaggcctctgatcgacctcatgacaaacactccagacatgaataaaaatgtggccaaaccttcaccggtggtgggacagctcatagacctgagctcccctctgatccagctgagccctgaggctgacaaggagaacgtggattccccactcctcaagttctaagccgaaccaaatcctttgccttgaaagaacagccctaaagtggttttcaaccctcagaaacaagctttaggctggtcgcagtggcttacacttgtaaccctagaacttgggaggctgaggtgggcggattacttgagcccaggagttcgggaccagcctgggaaatatagtgaaactcctgtccctacaaaaagtacaaaaattagccgggtgtggtagtgcatgcctgtagtcccagctacttgggaggctgaagtgggaggatggcctgagctcaaggagatgcaggctgcagtgggctgtgattgtgccactgcactccagcctgggcaccaatgtgagaacctgtcttggaaaaaaaaaaaaaaagaaacatgttttagtagaagttttatttgaaaaagaaaaataagcataaatatattcccagtgctggagagggtgggctgagggactggggccagcacggaccacccaaggcctctgcttcccgccgccaccctcctcgctgccattctctgggctggaatgtgaagcctcagtcactctaaatgaagaattttcttttgaatgttttgtatgtaaaatagcaagtggctatttttaaagttaagtttgtataaatagttagatattctagatttacattaaattgtaaaataaatggacttattgaagcataaaaaaaaaaaaaaaaa

SEQ ID NO: 385 - protein, 534 aa, Homo sapiens
MPVAGGKANKDRTEDKQDGMPGRSWASKRVSESVKALLLKGKAPVDPECTAKVGKAHVYCEGNDVYDVMLNQTNLQFNNNKYYLIQLLEDDAQRNFSVWMRWGRVGKMGQHSLVACSGNLNKAKEIFQKKFLDKTKNNWEDREKFEKVPGKYDMLQMDYATNTQDEEETKKEESLKSPLKPESQLDLRVQELIKLICNVQAMEEMMMEMKYNTKKAPLGKLTVAQIKAGYQSLKKIEDCIRAGQHGRALMEACNEFYTRIPHDFGLRTPPLIRTQKELSEKIQLLEALGDIEIAIKLVKTELQSPEHPLDQHYRNLHCALRPLDHESYEFKVISQYLQSTHAPTHSDYTMTLLDLFEVEKDGEKEAFREDLHNRMLLWHGSRMSNWVGILSHGLRIAHPEAPITGYMFGKGIYFADMSSKSANYCFASRLKNTGLLLLSEVALGQCNELLEANPKAEGLLQGKHSTKGLGKMAPSSAHFVTLNGSTVPLGPASDTGILNPDGYTLNYNEYIVYNPNQVRMRYLLKVQFNFLQLW

SEQ ID NO: 386 - DNA, 1887 bp, Homo sapiens
ccatggcggcgcggcggcgacggagcaccggcggcggcagggcgagagcattaaatgaaagcaaaagagttaataatggcaacacggctccagaagactcttcccctgccaagaaaactcgtagatgccagagacaggagtcgaaaaagatgcctgtggctggaggaaaagctaataaggacaggacagaagacaagcaagatggtatgccaggaaggtcatgggccagcaaaagggtctctgaatctgtgaaggccttgctgttaaagggcaaagctcctgtggacccagagtgtacagccaaggtggggaaggctcatgtgtattgtgaaggaaatgatgtctatgatgtcatgctaaatcagaccaatctccagttcaacaacaacaagtactatctgattcagctattagaagatgatgcccagaggaacttcagtgtttggatgagatggggccgagttgggaaaatgggacagcacagcctggtggcttgttcaggcaatctcaacaaggccaaggaaatctttcagaagaaattccttgacaaaacgaaaaacaattgggaagatcgagaaaagtttgagaaggtgcctggaaaatatgatatgctacagatggactatgccaccaatactcaggatgaagaggaaacaaaaaaagaggaatctcttaaatctcccttgaagccagagtcacagctagatcttcgggtacaggagttaataaagttgatctgtaatgttcaggccatggaagaaatgatgatggaaatgaagtataataccaagaaagccccacttgggaagctgacagtggcacaaatcaaggcaggttaccagtctcttaagaagattgaggattgtattcgggctggccagcatggacgagctctcatggaagcatgcaatgaattctacaccaggattccgcatgactttggactccgtactcctccactaatccggacacagaaggaactgtcagaaaaaatacaattactagaggctttgggagacattgaaattgctattaagctggtgaaaacagagctacaaagcccagaacacccattggaccaacactatagaaacctacattgtgccttgcgcccccttgaccatgaaagttacgagttcaaagtgatttcccagtacctacaatctacccatgctcccacacacagcgactataccatgaccttgctggatttgtttgaagtggagaaggatggtgagaaagaagccttcagagaggaccttcataacaggatgcttctatggcatggttccaggatgagtaactgggtgggaatcttgagccatgggcttcgaattgcccaccctgaagctcccatcacaggttacatgtttgggaaaggaatctactttgctgacatgtcttccaagagtgccaattactgctttgcctctcgcctaaagaatacaggactgctgctcttatcagaggtagctctaggtcagtgtaatgaactactagaggccaatcctaaggccgaaggattgcttcaaggtaaacatagcaccaaggggctgggcaagatggctcccagttctgcccacttcgtcaccctgaatgggagtacagtgccattaggaccagcaagtgacacaggaattctgaatccagatggttataccctcaactacaatgaatatattgtatataaccccaaccaggtccgtatgcggtaccttttaaaggttcagtttaatttccttcagctgtggtgaatgttgatcttaaataaaccagagatctgatcttcaagcaagaaaataagcagtgttgtacttgtgaattttgtgatattttatgtaataaaaactgtacaggtctaaaaaaaaaaaaaaaaaaaaaaaaaaa

SEQ ID NO: 387 - protein, 344 aa, Homo sapiens
MAQKENSYPWPYGRQTAPSGLSTLPQRVLRKEPVTPSALVLMSRSNVQPTAAPGQKVMENSSGTPDILTRHFTIDDFEIGRPLGKGKFGNVYLAREKKSHFIVALKVLFKSQIEKEGVEHQLRREIEIQAHLHHPNILRLYNYFYDRRRIYLILEYAPRGELYKELQKSCTFDEQRTATIMEELADALMYCHGKKVIHRDIKPENLLLGLKGELKIADFGWSVHAPSLRRKTMCGTLDYLPPEMIEGRMHNEKVDLWCIGVLCYELLVGNPPFESASHNETYRRIVKVDLKFPASVPTGAQDLISKLLRHNPSERLPLAQVSAHPWVRANSRRVLPPSALQSVA

SEQ ID NO: 388 - DNA, 1224 bp, Homo sapiens
ggccgggagagtagcagtgccttggaccccagctctcctccccctttctctctaaggatggcccagaaggagaactcctacccctggccctacggccgacagacggctccatctggcctgagcaccctgccccagcgagtcctccggaaagagcctgtcaccccatctgcacttgtcctcatgagccgctccaatgtccagcccacagctgcccctggccagaaggtgatggagaatagcagtgggacacccgacatcttaacgcggcacttcacaattgatgactttgagattgggcgtcctctgggcaaaggcaagtttggaaacgtgtacttggctcgggagaagaaaagccatttcatcgtggcgctcaaggtcctcttcaagtcccagatagagaaggagggcgtggagcatcagctgcgcagagagatcgaaatccaggcccacctgcaccatcccaacatcctgcgtctctacaactatttttatgaccggaggaggatctacttgattctagagtatgccccccgcggggagctctacaaggagctgcagaagagctgcacatttgacgagcagcgaacagccacgatcatggaggagttggcagatgctctaatgtactgccatgggaagaaggtgattcacagagacataaagccagaaaatctgctcttagggctcaagggagagctgaagattgctgacttcggctggtctgtgcatgcgccctccctgaggaggaagacaatgtgtggcaccctggactacctgcccccagagatgattgaggggcgcatgcacaatgagaaggtggatctgtggtgcattggagtgctttgctatgagctgctggtggggaacccaccctttgagagtgcatcacacaacgagacctatcgccgcatcgtcaaggtggacctaaagttccccgcttctgtgcccacgggagcccaggacctcatctccaaactgctcaggcataacccctcggaacggctgcccctggcccaggtctcagcccacccttgggtccgggccaactctcggagggtgctgcctccctctgcccttcaatctgtcgcctgatggtccctgtcattcactcgggtgcgtgtgtttgtatgtctgtgtatgtataggggaaagaagggatccctaactgttcccttatctgttttctacctcctcctttgtttaataaaggctgaagctttttgt

SEQ ID NO: 389 - protein, 615 aa, Homo sapiens
MPSRKFADGEVVRGRWPGSSLYYEVEILSHDSTSQLYTVKYKDGTELELKENDIKPLTSFRQRKGGSTSSSPSRRRGSRSRSRSRSPGRPPKSARRSASASHQADIKEARREVEVKLTPLILKPFGNSISRYNGEPEHIERNDAPHKNTQEKFSLSQESSYIATQYSLRPRREEVKLKEIDSKEEKYVAKELAVRTFEVTPIRAKDLEFGGVPGVFLIMFGLPVFLFLLLLMCKQKDPSLLNFPPPLPALYELWETRVFGVYLLWFLIQVLFYLLPIGKVVEGTPLIDGRRLKYRLNGFYPFILTSAVIGTSLFQGVEFHYVYSHFLQFALAATVFCVVLSVYLYMRSLKAPRNDLSPASSGNAVYDFFIGRELNPRIGTFDLKYFCELRPGLIGWVVINLVMLLAEMKIQDRAVPSLAMILVNSFQLLYVVDALWNEEALLTTMDIIHDGFGFMLAFGDLVWVPFIYSFQAFYLVSHPNEVSWPMASLIIVLKLCGYVIFRGANSQKNAFRKNPSDPKLAHLKTIHTSSGKNLLVSGWWGFVRHPNYLGDLIMALAWSLPCGFNHILPYFYIIYFTMLLVHREARDEYHCKKKYGVAWEKYCQRVPYRIFPYIY

SEQ ID NO: 390 - DNA, 3714 bp, Homo sapiens
ccgggttgctgtgcgactattctccgggagccgttcgtgtcaccgccggaacctggcgcaggttaattatagaaaatgccaagtaggaaatttgccgatggtgaagtggtaagaggtcgatggcctgggagttcactttattatgaagtagaaattctgagccacgacagcacctcccagctttacactgtgaagtataaagatggaacagagcttgaattgaaagagaatgatattaagcctttaacttcctttaggcaaaggaaaggtggctcaacttccagttccccttccagacgccgagggagtcgatcaaggtcacgctcccgatcccctggtcgaccacctaaaagtgcccgccgatctgcttctgcttcccaccaggccgacattaaggaagcaaggagggaagtggaagttaaattgactccgctgattctgaagccatttggaaatagcatcagcagatataatggggagcctgagcatattgagagaaatgacgcacctcataaaaatacacaggaaaaattcagtttgtcacaagaaagcagttacatagcaacacagtatagccttcgtccaagaagagaagaagtcaaattaaaagaaatagattctaaggaagaaaaatacgttgcaaaagaactggcagtgagaacctttgaagtgacccccatccgggcaaaggacttggagtttggaggagtacctggtgtgtttctcatcatgtttggcctgcctgtgttcctcttcctgttgctgttgatgtgtaaacagaaagatcccagtcttctgaatttccctcctcctttgccagctttgtatgagttatgggaaaccagagtatttggggtctacctcctgtggtttttgattcaagtcctgttctacctactgccaattggaaaggttgtagaaggaacgcctcttattgatggaagaagactcaagtatagattaaatggattctatccttttatcctgacatctgcagtcatcggaacatctctcttccagggcgtagagtttcattacgtgtacagtcattttcttcagtttgcacttgcggccactgttttttgtgtggtcttgagtgtgtatctctacatgcgctctttgaaagcgccccggaatgacctgtcgcctgccagctctggaaatgctgtctatgatttcttcattggccgtgaattaaaccctcgaattggtacttttgatctcaaatacttttgtgaattgcgccccggattgattggatgggtggttattaacttggtgatgcttttggctgaaatgaaaatacaggaccgcgctgttccatccttggccatgattttagttaatagtttccagcttctctatgtggtggatgctctctggaatgaggaagcgttgttgacgaccatggacatcatccacgatggatttggattcatgctggcttttggagacttggtgtgggttccctttatttacagcttccaagccttttatttagtcagtcatccaaatgaagtgtcttggccaatggcttctctaattattgttctgaaactttgtggttatgtaatcttccgaggtgcaaattctcagaaaaatgcattccggaaaaatcccagtgatccaaagcttgcacatttaaaaaccattcatacttcaagtggaaaaaatcttctagtttctggatggtggggctttgttcgccaccccaattacttgggtgatctcatcatggccttggcgtggtccctcccatgtggttttaaccacattctgccttatttctacataatttatttcaccatgttgcttgtccaccgagaagctcgtgacgagtaccactgtaagaagaaatacggcgtggcttgggaaaagtactgtcagcgtgtgccctaccgtatatttccatacatctactaatgctcttctggcttttctacaaaatactcctgcaattccagctgccatttgcaaaaacaggaaaaaaatccgaaactttcttttgttgcactgacagggtctgtacttttttttttctttttgagtcaggactatggagccgagtagttgatcttttaatatagccgtgtttacttgtattaacttacagttaacataggaaaaatacaagtaaggatgtgagaatttgcattttaatgggaaattttcaacccttaatctgaaaacagaagacagtcttaatataaatgtactgtgaagaatgctattgatgtttatggtttctgattacttttcaaattttgatgtttttttgccagttggcttttcttaaatgaaaacactgttccatttaaagtacatttatgttttattcagtaagagaatagaattttcatttgtttttctttaaatcctttactaattatataatttgaaagcaaaaagaagggcctatattaaatgctgaaagtgaaaagtgatgacattattagcagacactgcttaaaggagaccatttgtagcagttggcttaacctcaacttctaaaactacattgaaaatgtaaatacatagcttagttttttgtaatatatggtgacttcagatttttttgtacagtattttgaatgtgagatgattgtcaggactaactgtctttttaacaaaacattttcagtattttaaataaaattttgtaaagtaatgtgaattaaaaattttggaacaattagaattcattcactattgtatagaagatgctgttaaaacataggaagggtatttttcttgatccaaagtttgtgaatttggctttgctacctcaattgcaggtgtttgtttgcctttataaactgttgcaaatagaaaaaaaatagaataagtatatatttttggagtaacatcaatatttaaacatttttacacagatcggtgtttgaaaatttgccatttcaggctaatatttttatatatttttgactttttaaaagttcatcagtgtttttgctactgttaagcttatgcagtttatactgtattttttatgtatcctttatatttaccaaacctgactccctgtaaaggagtgctgtcttaaaaacaactgaaggggttaaagtcgtttcttttagtttaatagatgtgcataaggtagctttagcaattaaattctagtgaagttgatatagtctcatttttaattgtcctgtaatggaacagtagcaaattcactaaacttttgtgttcagagttaaattgttctcagtactttcaatgtaggggaatgtaataaacatagtgtgtatgtttgggttttaattacacattttatatatgagccatttagatatgcagtgttaattctatactgcatttgaagtgtatgtaacttagcttatgttaatgcagtcatgaagttggtttgctccagcatccggtagtctttaaacattcttttagtgaaattgtcattgttttatcagtgctaatgtgtgcaagcagtttttttattttgcttttctcctggcatcagaaagtggtggcgttttctgtactggattgcaccaaggaagcttttggggaggaaggaaggacattaaattctttccctggtaatgaaaagagccctttatcaatacagtgctgcaatttctggatatcagctacactttgtttttaagtttgtttttgacatgtttatttggcaaattttataatgaagttttaagttgaaaataaaatgtagcaaca

SEQ ID NO: 391 - protein, 356 aa, Homo sapiens
MFPSSQIPSWKDWAKPGPYDQPLVNTLQRRKEKREPDPNGGGPTTASGPPAAAEEAQRPRSMTVSAATRPGEEMEACEELALALSRGLQLDTQRSSRDSLQCSSGYSTQTTTPCCSEDTIPSQVSDYDYFSVSGDQEADQQEFDKSSTIPRNSDISQSYRRMFQAKRPASTAGLPTTLGPAMVTPGVATIRRTPSTKPSVRRGTIGAGPIPIKTPVIPVKTPTVPDLPGVLPAPPDGPEERGEHSPESPSVGEGPQGVTSMPSSMWSGQASVNPPLPGPKPSIPEEHRQAIPESEAEDQEREPPSATVSPGQIPESDPADLSPRDTPQGEDMLNAIRRGVKLKKTTTNDRSAPRFS

SEQ ID NO: 392 - DNA, 5645 bp, Homo sapiens
cgtccaccgtggagtctctccttgctttgggtccactgagccccacacattgttgagtgtctgattgtctccttgcccttacaggacaggaaagcgaaatctctgttcctttgtagggacctttcttttgtaggtgaaagggacagaaatatgattctggcctccttgatggtgaatacaggaacactttcagataaattacaatagagaggagtcagcttatttaaacaaactgaggttaagccagagattgcagttaacagtgaaaaaatttaaagcaagtacctggatggatgcaaagcagtgcccaggagacccaacttacgtgacagagatgatcattgtcactcattcattatgttttgagcaccagccatgtgccaggtccagaactagaagaaacttgggtgtaggtgagatcataggaacagtccctgccccagctgaacatcaggaagccagactgggagcacatgccgtggctgactaggactccagcagggacctggggttccatcagatcagtgtaaagcgatggtttcccaaatgagacctctccagagatggttcattccaccccgcaatggccaccagaaacattgtgctgaccagagggcttcactgccccaaaccccaaaatcacactccaggatgagaaacctaaaagtctatcttgatgaggcttcatagctggaaaccacccctcatggatccacaggctgcatttgatgaaaggagactccaggaagtcgagccattccaggcagacatgtagcaaaagcccgagctggggtccgccctcatgcaataaataacacctgtgcacataagagaggtgacaggcagggcatccctggggacctgggcctgtggcacgtgaagaaacacccaagagagcacgaagtcccaatgccatgaccagatatttcggtgccaggcatgcttctgggtcccagcaaaagacacacaaatccgtgtccttggggacccacagtctagtgacctagggctggccgggtcgcacgcttcttttcaagggctcgaaagcctctgcatggatgcaactttgggggaaaagtaaccctaaccctctgcttctctcatcctcccctcttctgtgtatatgtctgtctctttctctctgtgtgtgcccttccccactcccatccccattcctttttttatttattatattttggtggtgtgtggctcggtttctgttggtcccctcgtgtggcccctcccctgctgcagaactcgtccagctcggcctcctccgaagcctcggaaacctgccagtcagtgagcgagtgcagctcccccacctctgtcagctcgggctccaccatgggtgcctgggtgtccacagagaaggtgaccgcccgggtggcagccacagcggccccactctccctggtccccctgcctgctgctcagacagccctcacagccgcggcaacctggaagctcagaatcgacaccaagagtggggctcctcttggggacagagggtgggacaaggctgagagcattttctagaatgagtgcctggctgctggacaatgaccacatggttgtctcaagggagaggaaggggtatggggaatttggaggtgtgaaggctttctcccagaccaggtgttgcgtgcctgtccatcctcctccctcccttcccgagccacccaccagaccgttggatgagccatgtcactgtgtcagaggctgtgtgcttttccgctttttagtttgcacccccacccccctgcccttgattgagaatgtgctcctgagcaatgcgacgattttggaaacctagaatgaacagattcatttgaagatgctttggaatttttaaatttgcataatgaaatgagcaaatcactatcaccattaaatgaggcttcattagttacattatcaaaaaccattgacaaggccacaaattgagggcactgatcaatttccaaacttctaaaacgtaggtcaaacatagatgcttatttgctgtcaaactcatgtgcattctttgcaccccggctcttttctcttgcatcacagatcatccgtgagcagcagagccccaatgtttgttttatttataaatattcaggtttcccctcccttgaatgtcaatgccattttgtatctccgcactcatcctgttatattaattttttttcctttcccccccctttttttgtttgtttccagttgtctaacgggttttctcactatagtttatcaagtgagtcccacgtggggcccacgggtgcaggccttttccctcattgcctgcctgcctcccgcctgctccctcgggtcacctctgtccaccttccagactacgctcattattacaccattgggcccggcatgttcccgtcatctcagatccctagctggaaggactgggctaagcctgggccctatgaccagcctctggtgaacaccctgcagcgccgcaaagagaagcgagaaccggaccccaacgggggaggacccactaccgccagcggcccacctgcagcagctgaggaggctcagagaccacggagcatgactgtatcggctgccaccaggcctggtgaggagatggaggcttgtgaggagctggccctggccctgtctcggggcctgcagctggacacccagaggagcagccgggactcgcttcagtgctccagcggctacagcacccagacaaccaccccctgctgctctgaggacaccatcccttcccaagtttcagattatgattatttctctgtaagtggtgaccaggaggcagatcagcaggagttcgacaagtcctccaccattccaagaaacagcgacatcagccagtcctaccgacggatgttccaagccaagcgtccagcctcaactgctggcctccccaccaccctgggacctgctatggtcactccaggggttgcaactatccgacggaccccttccaccaagccttctgtccgccggggaaccattggagctggtcccatccccatcaagacacccgtgatccctgtcaagaccccaaccgtcccagacctcccaggggtgttgccagcccctccagatgggccagaagagcggggggagcacagccctgagtcgccatctgtgggtgagggcccccaaggtgtcaccagcatgccctcctcaatgtggagcggccaagcttccgttaaccctccacttccaggcccgaagcccagtatccctgaggagcacagacaggcaattccagaaagtgaagctgaagaccaggaacgggaacccccaagtgccactgtctccccaggccagattccagagagtgaccctgcagacctgagcccaagggatactccacaaggagaagacatgctgaacgccatccgaaggggcgtgaaactgaagaagaccacgacaaacgatcgctcagcccctcgcttttcttaggttcacaagaaatgcgccggtggggaatgaactgtttcattaataaaacctaatttgtcttgatccattccactctataataaaacaaaagattttgtaggcaactcggaatatagctcttttgaaagtactcgacacctttagataagaattaaaaccaacctatgtaactgacataatcttgatcttttaatttgtaaatattgacaattttctttctgcacattttaatcttagtttcccttttgatttttctgaaggtgccaaattccatttaacttttttacaagtctttgtaaaattttaaatgcataaagggggttggggcaggggaaccacgaagtagttaattttagaaaaggatttactatacttcactcttctttttttttccccacaagcttttgtagatgcattgtagtagtctagcttagaagcaaatgcaagttattttaatgtacaaactaaatgggtaagaggtaaaatcttcatttaaatatactatgttctggatgaaaagagcaggagtaacaattgatgagcaatattcagagtgaagtaaatctggaaatggtagactgtgttgggattggggggagggccatgggaggggtacatcgtcaacatagccgatcctgttacatttaagagtagcctcgtaggttgaatttcttctggtagcttcatggtaaatgcatccgaataagccatactggattgcagtgtttgtttctgtagggtgtttaaggacttgacttcctttctcccatgattcctctggactgcacacagcacccacaaccagccccatgcatgctgctgcctctgggcagtcgtagaatctcccacttcagtttctcgttgattgtactcacctttatggaatccaaatacatccaaaagggtaaggcagttttaaaaatgtgaaaacatttaaaaatgataatagcagggaattcttagattatagtaaatgccttttacttaactgtgcccagcaggctgggtgcgttaaaaagcccaagtattttgaaaaaactcgaacagatttgacaagggtagccagcttggagtctagcaacttgccaatgtgtttaccaatctgggggcttgtttttcttttcttctttcaaataaatggcagttaactggctttacagtaaacattgaagagaggaggatttgtttattgtcactgggaatctgaccactatactgtcctttttttgtattctgggtaatgttttttggaaaagatttgtcttttctaagtggaagttaaatttgttatactgcccatcccctaaagccaacagagatttgtagatttaaagggatcacatttgaagacaatagtgtttaagaaagcaagcaagtcccttagcagtcaggtcataacagggcacatttctgaccgaaccctctcaaggcagaggaggagtttggtgggtttcatacaccctgcagattcctgttggctctaaccctcaattacctaatcttatgctttaacacataactgcattggatgtgagagtaacgtaccgtatggtcattgttctatatattaacattgaacactgctgcgattgctcaaggacattttatgttacggctttaaagcaaaggcatgattattagaaactatttaagcttttttctttgaaaaacaagcttcttttacagaatataaacaacagtagtgcctgtggtttagcccaccaatcttgatgactaaaagtagctgatgcattgtgcatatgatgcttgagatggtttttgcaaaagcagaaatcgctgcaaggtaatcacaatagataaaagtggtattttaaacctttgaaataaatggatgtaactgtaccttggtacagcttttcacttgtttagtttttaaacgttagtataatctgaataaataaaatgttgccaaattcaatgtagaaagaatgtgacaacacaccttgggtagttctgcttgtgtttttgcatattgtaaaagcagtgtcacagctaaaaagaaagaaatcgtttctaacagtaaattattgtgctttagttgctagtttgtactgagagttgacctctccctgtgcagttttttgttctaaacttgtataaataacaattgtgtaatgtgtctccctcctacattgtaacaattgcttcagcctacgttataaataaagaaccactagatt

SEQ ID NO: 393 - protein, 667 aa, Homo sapiens
MHHQQRMAALGTDKELSDLLDFSAMFSPPVSSGKNGPTSLASGHFTGSNVEDRSSSGSWGNGGHPSPSRNYGDGTPYDHMTSRDLGSHDNLSPPFVNSRIQSKTERGSYSSYGRESNLQGCHQQSLLGGDMDMGNPGTLSPTKPGSQYYQYSSNNPRRRPLHSSAMEVQTKKVRKVPPGLPSSVYAPSASTADYNRDSPGYPSSKPATSTFPSSFFMQDGHHSSDPWSSSSGMNQPGYAGMLGNSSHIPQSSSYCSLHPHERLSYPSHSSADINSSLPPMSTFHRSGTNHYSTSSCTPPANGTDSIMANRGSGAAGSSQTGDALGKALASIYSPDHTNNSFSSNPSTPVGSPPSLSAGTAVWSRNGGQASSSPNYEGPLHSLQSRIEDRLERLDDAIHVLRNHAVGPSTAMPGGHGDMHGIIGPSHNGAMGGLGSGYGTGLLSANRHSLMVGTHREDGVALRGSHSLLPNQVPVPQLPVQSATSPDLNPPQDPYRGMPPGLQGQSVSSGSSEIKSDDEGDENLQDTKSSEDKKLDDDKKDIKSITSNNDDEDLTPEQKAEREKERRMANNARERLRVRDINEAFKELGRMVQLHLKSDKPQTKLLILHQAVAVILSLEQQVRERNLNPKAACLKRREEEKVSSEPPPLSLAGPHPGMGDASNHMGQM

SEQ ID NO: 394 - DNA, 2500 bp, Homo sapiens
cggggggatcttggctgtgtgtctgcggatctgtagtggcggcggcggcggcggcggcggggaggcagcaggcgcgggagcgggcgcaggagcaggcggcggcggtggcggcggcggttagacatgaacgccgcctcggcgccggcggtgcacggagagccccttctcgcgcgcgggcggtttgtgtgattttgctaaaatgcatcaccaacagcgaatggctgccttagggacggacaaagagctgagtgatttactggatttcagtgcgatgttttcacctcctgtgagcagtgggaaaaatggaccaacttctttggcaagtggacattttactggctcaaatgtagaagacagaagtagctcagggtcctgggggaatggaggacatccaagcccgtccaggaactatggagatgggactccctatgaccacatgaccagcagggaccttgggtcacatgacaatctctctccaccttttgtcaattccagaatacaaagtaaaacagaaaggggctcatactcatcttatgggagagaatcaaacttacagggttgccaccagcagagtctccttggaggtgacatggatatgggcaacccaggaaccctttcgcccaccaaacctggttcccagtactatcagtattctagcaataatccccgaaggaggcctcttcacagtagtgccatggaggtacagacaaagaaagttcgaaaagttcctccaggtttgccatcttcagtctatgctccatcagcaagcactgccgactacaatagggactcgccaggctatccttcctccaaaccagcaaccagcactttccctagctccttcttcatgcaagatggccatcacagcagtgacccttggagctcctccagtgggatgaatcagcctggctatgcaggaatgttgggcaactcttctcatattccacagtccagcagctactgtagcctgcatccacatgaacgtttgagctatccatcacactcctcagcagacatcaattccagtcttcctccgatgtccactttccatcgtagtggtacaaaccattacagcacctcttcctgtacgcctcctgccaacgggacagacagtataatggcaaatagaggaagcggggcagccggcagctcccagactggagatgctctggggaaagcacttgcttcgatctattctccagatcacactaacaacagcttttcatcaaacccttcaactcctgttggctctcctccatctctctcagcaggcacagctgtttggtctagaaatggaggacaggcctcatcgtctcctaattatgaaggacccttacactctttgcaaagccgaattgaagatcgtttagaaagactggatgatgctattcatgttctccggaaccatgcagtgggcccatccacagctatgcctggtggtcatggggacatgcatggaatcattggaccttctcataatggagccatgggtggtctgggctcagggtatggaaccggccttctttcagccaacagacattcactcatggtggggacccatcgtgaagatggcgtggccctgagaggcagccattctcttctgccaaaccaggttccggttccacagcttcctgtccagtctgcgacttcccctgacctgaacccaccccaggacccttacagaggcatgccaccaggactacaggggcagagtgtctcctctggcagctctgagatcaaatccgatgacgagggtgatgagaacctgcaagacacgaaatcttcggaggacaagaaattagatgacgacaagaaggatatcaaatcaattactagcaataatgacgatgaggacctgacaccagagcagaaggcagagcgtgagaaggagcggaggatggccaacaatgcccgagagcgtctgcgggtccgtgacatcaacgaggctttcaaagagctcggccgcatggtgcagctccacctcaagagtgacaagccccagaccaagctcctgatcctccaccaggcggtggccgtcatcctcagtctggagcagcaagtccgagaaaggaatctgaatccgaaagctgcgtgtctgaaaagaagggaggaagagaaggtgtcctcggagcctccccctctctccttggccggcccacaccctggaatgggagacgcatcgaatcacatgggacagatgtaaaagggtccaagttgccacattgcttcattaaaacaagagaccacttccttaacagctgtattatcttaaacccacataaacacttctccttaacccccatttttgtaatataagacaagtctgagtagttatgaatcgcagacgcaagaggtttcagcattcccaattatcaaaaaacagaaaaacaaaaaaaagaaagaaaaaagtgcaacttgagggacgactttctttaacatatcattcagaatgtgcaaagcagtatgtacaggctgagacacagcccagagactgaacggc

SEQ ID NO: 395 - protein, 384 aa, Homo sapiens
MAIAYLGSSCPSQPPSSLALSLSPTPSDFEQESGIETAMRFSPDVALAVSTTPAVLPTTNIQPVGTPFEELPSERPTLEPATSPLVVTEVPEEPSQRATTVSTTMATTAATSTGDPTVATVPATVATATPSTPAAPPFTATTAVIRTTGVRRLLPLPLTTVATARATTPEAPSPPTTAAVLDTEAPTPRLVSTATSRPRALPRPATTQEPDIPERSTLPLGTTAPGPTEVAQTPTPETFLTTIRDEPEVPVSGGPSGDFELPEEETTQPDTANEVVAVGGAAAKASSPPGTLPKGARPGPGLLDNAIDSGSSAAQLPQKSILERKEVLVAVIVGGVVGALFAAFLVTLLIYRMKKKDEGSYTLEEPKQASVTYQKPDKQEEFYA

SEQ ID NO: 396 - DNA, 6400 bp, Homo sapiens
ctgagatgcaggcccagcgctggcgcagtgagaacttcgagagacccgtggacctggagggctctggggatgatgactcctttcccgatgatgaactggatgacctctactcggggtcgggctcgggctgtaagtacccccctccctacctctgcctgggggcagtgaccagtctgtatccagcctcaactctgagaagcccacggggggcttgcttcagtgaggcagggggcattcactgcctgggtcaggcaagttcttcttgctctggatccccagaacaagaagggcagaacatccttctggggatagaacaagacctgggaggacctcagggcccagaatgtccaggtctccagggtcccacgtctgcatctttgtgtgtgctatgtggctttctctgcagaccttgcttggttccggtggtcccgtcaggtgcaataagctgtggccaatggtggggttagggcagtgatgacacagggcaggtgcttcaagtggtgcctgggatggccccgccctggggaaggggagccaggtcagctgggtctagcagaatctcgggagagaagggcaccgcgaaccccactctgccatgtagcaactgtgtgcccctcggtgctccccctccctgaatccctgtattttcacctgtggatggtgagaaatacgacttcttctcagtgcctctaggagggtttgggataggaagctggggtctggcacagaggaggagctctcaaaatggtagcaaaaagaaggcagctgagactgggcccagtgagggcacgggctggcatctgaggagatggtacggggtctgcacgccacagagctggctccccacagccctcgcctctggtctcccctccttagccaagtcctttgagcctctttcaaattaatctttgtaaaacccgtttatattgggtcacatctctattcgcaaagttccctggctcccctccctcctgcctggttccgagcccaggagctggctgtggcttctccctcccccatcccctactccccgtctcatttcctcccaagttccttcactgtcccggctttgcgtcagccagattgctcaagcagttcccctgcctcaagggcttcttttcccttttaccctccgcctctgcctctgggggaagcccttagtgtaccacccctgccttgagcttgtggtaggggtgcctttggggtctgactcttcccagaatgccactcctgtgttcccctgcaagccccagcaagttttgcagccagtagcgcctcagttgctgctgcctggattcaacctcatagaaactgtaggctgggtgggcaggaatagtcaaggaaggcttcccgggagaggcggcccccagaatttttgacttggcagagagaagttggggaacatcagcaactgaccacctttagctggctgtgccttcctcctttctctcatcttttctgggaaaattgggtaaagagagggggttgggagacctaatcttgatggccattgcttacctgggatcctcatgcccctcacaaccacccagctccctagctctctccctctcccccaccccctcagacttcgagcaggagtcgggcattgagacagccatgcgcttcagcccagatgtagccctggcggtgtccaccacacctgcggtgctgcccaccacgaacatccagcctgtgggcacaccatttgaagagctcccctctgagcgccccaccctggagccagccaccagccccctggtggtgacagaagtcccggaagagcccagccagagagccaccaccgtctccactaccatggctaccactgctgccacaagcacaggggacccgactgtggccacagtgcctgccacagtggccaccgccacccccagcacccctgcagcacccccttttacggccaccactgctgttataaggaccactggcgtacggaggcttctgcctctcccactgaccacagtggctacggcacgggccactacccccgaggcgccctccccgcccaccacggcggctgtcttggacaccgaggccccaacacccaggctggtcagcacagctacctcccggccaagagcccttcccaggccggccaccacccaggagcctgacatccctgagaggagcaccctgcccctggggaccactgcccctggacccacagaggtggctcagaccccaactccagagaccttcctgaccacaatccgggatgagccagaggttccggtgagtggggggcccagtggagacttcgagctgccagaagaagagaccacacaaccagacacagccaatgaggtggtagctgtgggaggggctgcggccaaggcatcatctccacctgggacactgcccaagggtgcccgcccgggccctggcctcctggacaatgccatcgactcgggcagctcagctgctcagctgcctcagaagagtatcctggagcggaaggaggtgctcgtagctgtgattgtgggcggggtggtgggcgccctctttgctgccttcttggtcacactgctcatctatcgtatgaagaaaaaggatgagggcagctacacgctggaggaacccaagcaggcgagcgtcacataccagaagcctgacaagcaggaggagttctatgcctagtggagccacagtgcctccctgcagcctcaacaccaccctgctgtccagtccccagcctggccccaccagcccaagcctgggactgggcctggaacctggccccagttcttctctgccctctctcccaaggtctgcccaggctgccagcctcacacagatcttccccgaggaagaggggctgctgccatctgccccagactgtgcccttacgagctcatctcttgttcccctcatccctgccaccagtctggggcttcaggacctcatgtcagatggatgggaggaagaaagctcctgattggctggtggtggaagaaagggtggggcttgagatgagcctgagccctgacttggcacccacagtgctcactgagatctcctttttggggcagagaggcactcaggctggtttccaggacaaacatttggtaaacacagcccttgaaatcatctagacactgcaacctcttgctcgtatcccagggcctctctctagctgggtgagagggtgtcccttgtcaccagcctgttttgtcctggtctctctggggttgttgaatctctcctcttgcctgccaagtacacatgtacccagacttcatttctttctgcatcttcccccaagaaacagcttcctgagggtgctggggcagccactggtgaggaggggctgctctgatgtccctcctatgaggggactctgcacagacaccattgcccacactatcaccatattttcactcagtcacacacaagacaaaagcatgcaatgacaaaaccatacgcaatcctgaccgcccagccaatcaagacatatcacagaacacacgcgtccttccaagaatgtttatcctcatgcatcacttacacacccccagacacgtactgcaatgcaagtcactagtcatggtcacatgacagtgacagtgtggcctcctcctaccccaaatacacccacactctggcaccacacacattgtctccagctttcaggcttactggggagggtggaatcgagccagaacaatcagcccatattgggtccccctaagttgccccgtcatactcagtcccatgccatggtgcccacaccaaccatgcagccaccaaccccagccagtgtcagacacaatcccatgtggatgcacagtctcactccacatgacctgctctcaatgctggagggaaacaggcaggcccttgcctttctcggaaaaagtgtggggccacagcccttttagggcattgcatgcaggtgggcctggcttcacccctacctgcttcctccccaccgcagctggcagagggggaggtttggggccagacccccactagctgggagcctgggggctcctctaaggctgaggaaggaaatttggccccaggttgttggggggtcttgggtctcccaggacggaaggcccagggcagggagggggcatgtggttgggctcctttatctccctgtgtccccttcctgctttgagctagggggctgactctgcctcccaggacacaagtctccaaagtgcctgtgagggcgggccctccgcaccctctgccctctgcctggcaggccaacctcagcccacctgcccagaggccctccctgtggacaccccctcacctatttggccaaacaattctggctgcagcttcaggggccatggctggaagcagcccctgcagatccctcaggccccgaggtcagggtttgagggatgagaccaggtgatagtgggggaggggttacttcctttgttacctagcaagtagggctatttccatcggtattttaaatgtggggtcacagatcttttggggagggtgtgcttggcagggggcctcttggagccaaagggatgtggtgtgagttgcgattggctggcactcacacccccacccctcacccacatcccagattcaagtcaggaaggcaggttttatttcagggcccttttcaagatgccctggcagcagatttctgcaggatgaggggtagcggtgtgtaggcagtgagggggaggttccaggggctgtcccacagcctgtcttttccaggctgggctccatcttccagtcccaaaaccctccttcacagggcccagaggcttgtgaggaagccaggtggacccagccttggaagagtgggcatggggggcccctgatatctggagggggcgggttggcctcagtcatctttggagcagaagggctgggtcctggggccacagaccacaaggctcagcctccctaccctgctccctggggtgctgctgtcttggagagcacagctctggtgagacggcctgggcaggccgaggctgagaaaccagggaggatagaggagaaaagggcttgggcccccagccccagaagatgctgggccccaggtgggagacccaacagtgggtgcagtttctcagtggggctggagccaatggtgggggtggccccggcaggcctggctcctcacatcccaggggttggcttctgatttggggcttgggctccaggcactggcttctcttctctgtgtccttagcatttgagagaagaggccaggggccttgttcatggatccctggacccaaggcagatgtccaggctttatcctcctgaggatgaggagtctgaccagcccaaatctgccctggccggcctgaccggggcaaggcagtccaagagagttcagtgaggaccagctaggctctcccaggtgcaatgtgggtgcagggccctcatgtccccctacccctgcctgtgatggagtgttctgaggggctttggcatttgctggaagcacagggagttccaaatgagagggagcttctgtggcttgagagcctctggggccttggctgccagagcacgaggcaggccaggacctggagagcccagaccctgtctccaggaggccaggaggccagatgggggccttgcctgaaagactggtccccttgatcgctggaggcatgtgggtggcaaccagggctgggcagggcttagggtgtgtgggccaaacccccctggggttggcaaagccgcctgtcaggcctcctggtgggggcccctggacacagggagcagaccctctgcctcatggggtaggagtggctgcctcctgtgttctctggatttcttctcccaacaactacaaccctggacttgcctccccaggcctcttgcctgtaaatagaagcccgcaaactgtacagatttacagaggcatcgagactgggccctgggagttgccatctgagagccgatggccccagcatcccccaggtgcctgcctggcaccacagtgaccctggcctcagcgtggcaaatgcatgtaaatatttttcgtaggcagcgtggctccagagagccccctgaagacagtgtccctccctcctgtgagtcctttctcctgtacagaacctgcctggggtgggtgggggtctgccattccctcccccaggccttccctgccccttctctcccctgtaacctgtttattaaccatacctgtcctgagttcatggccaaaaccttaaataagaaaaacaaaagaaaaagacagtggaaaaaagagaccaaggcgcctgccccactgcgggtactctcctgttccagccttgtgaaggaactggttttgtttttgtttttgttttttttttttttgtttgtttgtttgttttttaacacttcctgtgctgtgcccatttataagaggaaataaaattaagctgaaatg

SEQ ID NO: 397 - protein, 971 aa, Homo sapiens
MATVRASLRGALLLLLAVAGVAEVAGGLAPGSAGALCCNHSKDNQMCRDVCEQIFSSKSESRLKHLLQRAPDYCPETMVEIWNCMNSSLPGVFKKSDGWVGLGCCELAIALECRQACKQASSKNDISKVCRKEYENALFSCISRNEMGSVCCSYAGHHTNCREYCQAIFRTDSSPGPSQIKAVENYCASISPQLIHCVNNYTQSYPMRNPTDSLYCCDRAEDHACQNACKRILMSKKTEMEIVDGLIEGCKTQPLPQDPLWQCFLESSQSVHPGVTVHPPPSTGLDGAKLHCCSKANTSTCRELCTKLYSMSWGNTQSWQEFDRFCEYNPVEVSMLTCLADVREPCQLGCRNLTYCTNFNNRPTELFRSCNAQSDQGAMNDMKLWEKGSIKMPFINIPVLDIKKCQPEMWKAIACSLQIKPCHSKSRGSIICKSDCVEILKKCGDQNKFPEDHTAESICELLSPTDDLKNCIPLDTYLRPSTLGNIVEEVTHPCNPNPCPANELCEVNRKGCPSGDPCLPYFCVQGCKLGEASDFIVRQGTLIQVPSSAGEVGCYKICSCGQSGLLENCMEMHCIDLQKSCIVGGKRKSHGTSFSIDCNVCSCFAGNLVCSTRLCLSEHSSEDDRRTFTGLPCNCADQFVPVCGQNGRTYPSACIARCVGLQDHQFEFGSCMSKDPCNPNPCQKNQRCIPKPQVCLTTFDKFGCSQYECVPRQLACDQVQDPVCDTDHMEHNNLCTLYQRGKSLSYKGPCQPFCRATEPVCGHNGETYSSVCAAYSDRVAVDYYGDCQAVGVLSEHSSVAECASVKCPSLLAAGCKPIIPPGACCPLCAGMLRVLFDKEKLDTIAKVTNKKPITVLEILQKIRMHVSVPQCDVFGYFSIESEIVILIIPVDHYPKALQIEACNKEAEKIESLINSDSPTLASHVPLSALIISQVQVSSSVPSAGVRARPSCHSLLLPLSLGLALHLLWTYN

SEQ ID NO: 398 - DNA, 4414 bp, Homo sapiens
cccacgcgtccggcggcggcggtagcggcggcagcggctgcggccaagctgggtccgagcatcccgcggctctggagccgcccggcccggacatggcgaccgtccgggcctctctgcgaggtgcgctgctccttctgctggccgtggcgggggtcgcggaggtggcagggggcctggctccgggcagtgcgggtgcattgtgttgtaatcattcaaaggataaccaaatgtgccgtgatgtatgtgaacagattttctcctcaaaaagtgaatcccgactaaaacatctgttgcagcgagccccagattattgcccagagacaatggttgaaatttggaattgtatgaattcatctttgccaggtgtgtttaagaagtctgatggctgggttggcttaggctgctgtgaactggctattgccttggagtgtcgacaggcatgcaagcaggcatcttcaaagaatgatatttccaaagtttgcagaaaagaatatgagaatgctcttttcagttgcattagcagaaatgaaatgggctcggtttgttgcagttatgcaggtcatcacacaaactgccgagaatactgtcaagccatttttcgaacagactcttctcctggtccatctcagataaaagcagtggaaaattattgcgcctctattagtccacaattaatacattgtgtgaacaattatactcaatcttatccaatgaggaacccaacggatagtttatattgctgtgacagagctgaagaccatgcttgccaaaatgcctgcaagagaatcctgatgtccaagaaaacggaaatggagattgttgatggtctcatcgagggttgtaagacccagcccttgcctcaagatcctctttggcaatgttttcttgaaagctcacaatctgttcaccctggagtcactgtacaccctcctccctctacaggcctcgatggggctaaattgcattgttgttctaaagcaaacacttcaacatgtagggaactctgcactaaactttacagcatgagctggggcaatacacagagttggcaagagtttgatcgcttttgtgaatataatccagtggaagtgtccatgttgacctgtttagcggatgtccgggaaccttgccagttgggctgtagaaaccttacttactgtactaattttaacaacaggccaacagaacttttcaggagttgtaatgcacagtcagatcaaggagccatgaatgacatgaagttgtgggagaaaggaagcataaagatgccatttatcaatatacctgttcttgatattaaaaagtgccagccagagatgtggaaagcaatagcttgttcactgcagattaaaccttgtcatagtaaatctcggggaagtattatttgcaaatcagattgtgtggagattcttaaaaaatgtggagaccagaacaaattccctgaagaccacacagctgaaagtatttgtgagcttctgtcacctacagatgatctgaagaattgtatacctttggatacatacctcaggccaagtactttaggtaacattgtagaagaagtgactcatccctgtaacccaaatccttgccctgccaatgagctctgtgaagtaaaccgaaaaggatgtccatctggagatccctgtcttccatacttttgtgttcaaggttgcaaactgggagaagcttctgatttcattgtccgtcaagggacactaatccaggtgccatcatctgcaggggaagttggttgttataaaatctgttcatgtggacaaagtggactcttagaaaactgtatggaaatgcactgtatagacctccagaagtcttgtattgttggaggaaaaagaaaaagtcatggaacatcctttagtattgactgcaatgtctgttcttgttttgctggcaatttggtgtgctctacccgcctttgcctcagtgagcacagttcagaagatgaccgtcgtaccttcacaggtctgccctgtaactgtgcagatcagtttgtccctgtatgtgggcagaatgggcgcacttaccccagtgcctgcattgctcgctgtgtgggcctccaagaccatcagtttgagtttggatcatgcatgtcaaaggatccatgtaatcctaatccctgccaaaaaaaccaaaggtgcatacccaaaccacaggtctgcctgacgacttttgataaatttggatgtagccagtatgagtgtgtaccaagacagctcgcgtgtgaccaggtccaagatcctgtttgtgacacagaccacatggagcacaacaatctctgcactttataccaaagaggaaaaagcctctcttacaaaggtccctgccagcccttttgcagagcaaccgagcccgtatgtgggcacaatggtgagacctacagcagtgtgtgtgctgcctactcggatcgcgtggcagtcgattactatggggactgccaggccgtcggagtcctctcagagcacagctccgtcgccgagtgtgcttctgtcaagtgtccttcgctcttggcagctggatgcaaacccatcatcccaccgggtgcttgttgcccattatgtgctgggatgttaagagttttatttgacaaagaaaaactggatactattgctaaggtaacaaataaaaagccaataacagttctggaaatacttcagaaaatccgcatgcacgtgtctgtcccacagtgtgatgtgtttggatacttcagcattgaatcagaaattgtgatcctgatcattcccgtcgatcactatccaaaagctctgcagattgaagcctgcaataaagaagcagagaagattgagtcccttatcaactctgacagcccgactttggcgtcccatgtccctctctctgccctcatcatttcccaggtacaggtctccagcagtgtgccatcggccggtgtcagggccaggccttcttgccactccctcctccttcccctcagcttgggccttgccttgcacttgctctggacatataactgactgcccacggaaagtgcagaatgctcctccacctcactctcctgccttgaaaaagacattcaggactgctggtttgtagttgaatattggccaaggaaaggcacatgtcacctctattcgccacacagtatttttttttttaatccgccaatattagtaggatttttgttttgtttttacaaatgttaaaatgtgttgttccaaatactaatgaaaacagaatgtctcttcctggtagaccactgccatatgatttacatttcctcaccataagggtcccccactctaaagcaaatttatcgctgggaaatgagatgaccactttttagaaagataattcactgtactatcaggttcacaaacttcatttcagagttctttttgaagtatttaaggttcccgttgcatttgttttgtttacagataattacctactctggctagaagctaggggtcccagtgaagagccactgccattaaagaatatgaaacatagataaaacatctttgaaattatgtaaattatgtaaattatcaggcaaatttgcattaaattacagaaatttaattcagaaccccaactactgtgttatgcaaaagcaagctgattaaatgacactcatataattatatgttgtaagcaacaggctcactggtcacggatttgtgtctgtgacttttgtgaaagggagaagtgacattgcatcaaagcatcttgcattatgcaatttttatattaaccagatatatattcatcggtattcatccaagttaaatgtagagtttttaaacatcaatctttaaaccaattgctgctacttatataattgccaaaaagtgaaataatgtgtagttcatgtaaataatacattatatttctattttattatgaagaaggtgaatagccatatttgtaaaatgacaatcatgtgtgttaacccagtgctttccattcgtgaaaacacatttgctttttgtgatatgcacaatgtagataagtgttctgtctgactttcttttttgatatagaagtataaagaattgtggtttatatatttaaaagtgtcaagctgagtattaaaatgtatgcatgttgtctaagaaattgaatacttgaatgtgtctcacagtttgaaataagctatttgatgtaatacttcttgtgtgtatgcacatgaaacttagattttacatgaagtattttttcagtattatatgtaccctctgaaatacatagggatatgcgtattataccaaaatgttgctgaaaaatgggcacttaaagctttcagaatatgtcagtgctgatgtagcatgcttgttgcaattgccttttttctgtataaatgtctttaatgcaatatactggaaagcttttctattttaataaaaataatttttatatg

SEQ ID NO: 399 - protein, 348 aa, Homo sapiens
  misc_feature (152)..(152): Xaa can be any naturally occurring amino acid
  misc_feature (154)..(154): Xaa can be any naturally occurring amino acid
  misc_feature (217)..(217): Xaa can be any naturally occurring amino acid
MGARGAPSRRRQAGRRLRYLPTGSFPFLLLLLLLCIQLGGGQKKKENLLAEKVEQLMEWSSRRSIFRMNGDKFRKFIKAPPRNYSMIVMFTALQPQRQCSVCRQANEEYQILANSWRYSSAFCNKLFFSMVDYDEGTDVFQQLNMNSAPTFXHXPPKGRPKRADTFDLQRIGFAAEQLAKWIADRTDVHIRVFRPPNYSGTIALALLVSLVGGLLYXRRNNLEFIYNKTGWAMVSLCIVFAMTSGQMWNHIRGPPYAHKNPHNGQVSYIHGSSQAQFVAESHIILVLNAAITMGMVLLNEAATSKGDVGKRRIICLVGLGLVVFFFSFLLSIFRSKYHGYPYSDLDFE

SEQ ID NO: 400 - DNA, 1521 bp, Homo sapiens
  misc_feature (798)..(798): n = a, c, g, or t
cggccgcggcccgggtccctcgcaaagccgctgccatcccggagggcccagccagcgggctcccggaggctggccgggcaggcgtggtgcgcggtaggagctgggcgcgcacggctaccgcgcgtggaggagacactgccctgccgcgatgggggcccggggcgctccttcacgccgtaggcaagcggggcggcggctgcggtacctgcccaccgggagctttcccttccttctcctgctgctgctgctctgcatccagctcgggggaggacagaagaaaaaggagaatcttttagctgaaaaagtagagcagctgatggaatggagttccagacgctcaatcttccgaatgaatggtgataaattccgaaaatttataaaggcaccacctcgaaactattccatgattgttatgttcactgctcttcagcctcagcggcagtgttctgtgtgcaggcaagctaatgaagaatatcaaatactggcgaactcctggcgctattcatctgctttttgtaacaagctcttcttcagtatggtggactatgatgaggggacagacgtttttcagcagctcaacatgaactctgctcctacattcaygcatttwcctccaaaaggcagacctaagagagctgatacttttgacctccaaagaattggatttgcagctgagcaactagcaaagtggattgctgacagaacggatgttcatattcgggttttcagaccacccaactactctggtaccattgctttggccctgttagtgtcgcttgttggaggtttgctttattngagaaggaacaacttggagttcatctataacaagactggttgggccatggtgtctctgtgtatagtctttgctatgacttctggccagatgtggaaccatatccgtggacctccatatgctcataagaacccacacaatggacaagtgagctacattcatgggagcagccaggctcagtttgtggcagaatcacacattattctggtactgaatgccgctatcaccatggggatggttcttctaaatgaagcagcaacttcgaaaggcgatgttggaaaaagacggataatttgcctagtgggattgggcctggtggtcttcttcttcagttttctactttcaatatttcgttccaagtaccacggctatccttatagtgatctggactttgagtgagaagatgtgatttggaccatggcacttaaaaactctataacctcagctttttaattaaatgaagccaagtgggatttgcataaagtgaatgtttaccatgaagataaactgttcctgactttatactattttgaattcattcatttcattgtgatcagctagcttattcttgtgtactttttttaaactgtgggttttcctagtaaatttaatttacagaaatcaatggtagcatttagtaatctacaaaggaaatatcaaagtgtttttcaagcctgttatatycagtgtgtkccacaggattgcaataaatgacaatgtaatta

SEQ ID NO: 401 - protein, 578 aa, Homo sapiens
PPARALGRAVAMASHVDLLTELQLLEKVPTLERLRAAQKRRAQQLKKWAQYEQDLQHRKRKHERKRSTGGRRKKVSFEASVALLEASLRNDAEEVRYFLKNKVSPDLCNEDGLTALHQCCIDNFEEIVKLLLSHGANVNAKDNELWTPLHAAATCGHINLVKILVQYGADLLAVNSDGNMPYDLCEDEPTLDVIETCMAYQGITQEKINEMRVAPEQQMIADIHCMIAAGQDLDWIDAQGATLLHIAGANGYLRAAELLLDHGVRVDVKDWDGWEPLHAAAFWGQMQMAELLVSHGASLSARTSMDEMPIDLCEEEEFKVLLLELKHKHDVIMKSQLRHKSSLSRRTSSAGSRGKVVRRASLSDRTNLYRKEYEGEAILWQRSAAEDQRTSTYNGDIRETRTDQENKDPNPRLEKPVLLSEFPTKIPRGELDMPVENGLRAPVSAYQYALANGDVWKVHEVPDYSMAYGNPGVADATPPWSSYKEQSPQTLLELKRQRAAAKLLSHPFLSTHLGSSMARTGESSSEGKAPLIGGRTSPYSSNGTSVYYTVTSGDPPLLKFKAPIEEMEEKVHGCCRIS

SEQ ID NO: 402 - DNA, 6250 bp, Homo sapiens
ctctgtcgccgctggagcagctgcggctcggggacccacagacacagccggggtcgggagccgcccggggcagggctcgggagagcgggccacaccatgaggccccagccccaccagaggccccgcgctgccctggcccccggtgcaccgtgctagcccccagccagggcgttggggagggcggtggccatggccagtcacgtggacctgctgacggagctgcagctgctggagaaggtgcccacgctggagcggctgcgggctgcccagaagcgccgggcccagcagctgaagaaatgggcacagtacgagcaggacttgcagcaccgcaagcgaaagcatgagcggaagcgcagcacgggcggccgccgcaagaaagtgtccttcgaggccagcgtggccctgctggaggcctcgctgaggaacgacgccgaggaagtacgctacttcctgaagaataaggtcagccctgatttgtgcaatgaggacggactcacagccctacaccagtgctgcatcgacaactttgaggaaattgtgaagctgctcctctcccatggtgccaatgtgaacgccaaggacaacgagctgtggacacctctccatgctgcagccacctgcggccacatcaacctggtgaagatcctcgttcagtatggggccgacttgcttgctgtcaactcggatgggaacatgccatatgacctctgcgaggatgaacccaccctggatgtcatcgagacctgcatggcataccagggcatcacccaagagaaaatcaacgagatgcgggtggctcctgagcagcagatgattgcggacatccactgcatgatcgcagcgggccaggacctggactggatagatgcccagggtgccacactgctgcacatagctggagccaatggatacctgcgggcagctgagctcctcctggaccatggagtgcgtgtggatgtgaaggactgggatggctgggagcccctgcatgcagctgccttctggggacagatgcagatggcagagctattggtgtcccatggagctagtctcagtgcaaggacatccatggatgagatgccaatagacctgtgcgaggaggaagagttcaaggtcctgctgctggagctaaaacacaagcatgatgtgatcatgaagtcacagctgaggcacaagtcatccttgagccggaggacctccagcgcaggcagccgtgggaaggtggtgcggcgagccagcctgtcggacaggaccaacctgtataggaaggagtatgagggagaggccatcctgtggcagcggagtgcagctgaggatcagcggacctccacctacaacggggacatcagggagaccaggacagaccaagagaataaggaccctaaccccaggctggagaagcccgtgctactctccgaatttcctaccaagatcccacgaggtgaactggacatgcctgttgagaatggcctccgggctccggtcagtgcctaccagtatgcgctggccaacggggatgtctggaaggtgcatgaggtgcctgactacagcatggcctatggcaaccctggcgtggccgacgccaccccgccctggagcagctacaaggaacagagccctcagacgcttctggagctgaagcggcagcgggctgcagccaagctgctcagccaccccttccttagcacacacctgggcagcagcatggccaggacgggcgagagtagcagtgaaggcaaggcccccttgatcggaggcagaacttcaccgtacagcagcaatgggacctcggtatattacacggtcaccagcggagatcccccactcttaaagttcaaggcccccatagaggagatggaggagaaggtgcatggctgttgccgtatctcctagtctccgtgtgatggaggagggagatgcctggggaggggctcctggaatccaggccagcccaacagccctggctggggaggtgtcagggcagctggggagaggtgggctctgcttttcagaggaactcagaccccagccctcagctggctgcccatagcatcccatgtcccacgtcccgtggttctgcttcctgctgcatcgtctgccatctgacacaaggcctgtcgtggcctcctggttcactctgctgtctgatcttgggagggtgggcttgagatcccagctctattcttggtataaaggcttctccggatcagtacatgcatgtcacattaacacacacacacacacacatatacacacacacacaagctcgatcagtgtgtgtaggaatgacatacctgggctcaggggaagcaagggggcttagaatttgtggggtattcccaaaaggatggaagttaagactcagagtctcattaccactgccaatgtggttttagcaggggaggggacctgctaagctgagacccatagtcctgctcagagttatcccaaagtctgagccaccagccacacctgacaggggtgagaagtcctcgctgtgttcagagggagccaggaatctacatgggtagatgagatagacacagacctgctccccgcagccttgttgagagccacacttctgcccatgccaggagccagctgtgtgaccatccaggggtggagggggaaaaccaggcaatttcgttcctggaatcaaccaaatcatgttttcctcttggatggaagtgtcaaaggcagaagggtgtgggagggggacaaggtcagtatttaccaaagtgtatctgattttaaaaattcctttagtctgtaaaactcctagagggagggaggtaactgaattcacttctttttgtggatcgtatcaaggtcactgggttttactggctggtgctgggaaaatgaagctaagtgaggagcttccattggaatgcttttccagggagagaggccagttaatttaaaaaaaacagtcgctagttaacagcgacagagcccagcaccctggggtctttgtgaatatccagactgtttcagcccagcccatctcagccaaccctccttagactgagctgtcagagcaagcaattaggggccagcctgcctccacctcccacccccttccacctccatcagtcatgtgtgcagagtcagtgctcgggatcccgggcccagcttttgcctttttggggatgcttggtgagacagatttgccagtcagcccttttgagttcccgcctcacccaggggctcccagcctgcacttgcaggagtggtgatgccccaagtctgcgaatccagggtgcacgtggtcaatatcccctcctgcattcaggagagccatggtagggctggagttgggtcttgcccagccctgcagtttcatagtcccagccttcctggtgctggggagggaggactgtgaatggctgttctcccctcactgctgagtctcccaggaccccctttggagatgcccatggcatgggcactgcccacaggctcagccagaacctcttggtgtacccgataagctgcaggttatcccttgctctgtgcgccttttatttgtccttaaactacctccttagagctctgaaggggtctcctagttccagattttaatttggggaacagatctgggttctttttaaccctcttctttctcagtctatgagaaacttgccctgaggggcacctgggctaggggcttgggactggaagaccatccccgccttgtgccacaactttggtcatgggatctgctctttgtcattcttagccccctactgtggcccccatagccccataacccagagagggagctggacttcagggagcctgagtgatgctttcccaggagcagggcagctggctggaccagaaagtagagggcccatgggagtgactgcacccttggtggctgctggaaagggagaggttctcagcatcaggccacctccaccccaatgccaggatagatgtattctagagtaggggtggaggcggcccaggaggctgaagacaggtgcacagatgcttcccacgaccttgccatttggggtgggctcttcaacatctcaggctgtggctggaacaggacaggatgatctaaaacacacgtaccattggctgtaaaacagtatgagcccagactgacgctgaaatccctcatgagccaaccttagctacaaggtagggagttctgagggaagccgcgtgctcctcaggagagagctgtttaggttttccgatctttttgctcaggggccaaacactgaaggcacgtactgcccaacccactgagcgcctgaggccattccctccttttccgcatgcctcctgcctcctgggctattcctctccacccagaaggctgggaatcccagctgattccctgacaggagccgacttcacacacaggtgactctcaggcattggctcatgttttcagccagggataaaccatcccttcttggggctttaagtccctggggagctttccctgtaggtctcctgggtgttgagagacaagttggagaccaacctccaatgaatgagccgcggtcattcattaattcactcacgtaatttactgagtagctgcaacatgccagcctctacgttaggttctgcggataaaggaggaataagacagagtcaggagaactgttccttgtggtttccgtcccttggggaccacaggcatcagcagtcccattcaagtcacctgaggcaaagtgtctgcatcttcgtccagcgaccctttgcttttcggctcctagaatccttagagtctgaattcctttagctgggaacagctgtcatggtcacccctggataacatttgccaccaagtatagatgctggatcttgggttccaggcagacatcatccaggtccatctggaactttcagtgatagctgccttcagccagcatctttgggggactctataatagcagcttgagatcagtgtctagaagactgttctgcaatttgctgccaaatgcatctcaggtttttaaagtcattgtttcttgctcatggtggctcatttattacatagtcccctcaccccactaatggataatgggaggaaaagttgctgcttccttcagcatcaaagcctttccttgggaatctgcctccctccatggcaggggtggattcgggagctgggagtaaccaggcaaagtcaaccagatgcctagctcctgctgagacccaggtcctatggcagctcctcattagattaaaggagaccacttccaaagcaggtgctgcatggctcaccatcatatgccccaaacaactgaaagttggcggttatcaccagactgtgagtttctggcaagtagcttggggaagctgaataaactctaggcccagggctactaaagacttcaggatagaattctccatcaaatatacagcataagtaaaactgctctgcactgtttaatccatttccaaggggcttagaaaagctaacaagggtgtgtcccctgtcctgccccaccggtttgctggctttgtaataacataagaccattgtggttgttggtgtcagataccttcccatcctgagctctctcacctacctgctctctctcctagagcaggatactggggtacttttaagaagggtgctccttttaagatgcccagaaaagctgtatttaactcttgctatttgtaacttggggatggtctcccctgccccagggcacataagagcaaaggctccaatggtcagtggatgactctgcaaaagtgaccccctgtgccagaagctatagccctctccccaacaggtctctcttgttggccagagggcctgcttcccatgggcattgcaagtgccaccgtgcggggcctggctctgcacacccaggaaaagtctgcagacccccagccctccgcaataattcaccagaccagaagccactggtgtacagagaacacttaaaaaaatgtattttatgtgaaaaaaaattaaaactctgtatactgtatcagcagctttgtgtaaaaatggcaatcaagagagtctaatatatttaaaacttttttaaaaaaaatcttcgcggatctttgatatcgtactgaggtaacttccacgtagccccttgccacgcggcaccggtgggccttgggtccaaaactgtggctcagccacatcccaaagggggcacatgtccctggagttgcttccagctgccaaggcctgtgacagaattcgctgttaagagtttttaattaaaattattaaattccttttaataac

SEQ ID NO: 403 - protein, 329 aa, Homo sapiens
MTTQQIDLQGPGPWGFRLVGGKDFEQPLAISRVTPGSKAALANLCIGDVITAIDGENTSNMTHLEAQNRIKGCTDNLTLTVARSEHKVWSPLVTEEGKRHPYKMNLASEPQEVLHIGSAHNRSAMPFTASPASSTTARVITNQYNNPAGLYSSENISNFNNALESKTAASGVEANSRPLDHAQPPSSLVIDKESEVYKMLQEKQELNEPPKQSTSFLVLQEILESEEKGDPNKPSGFRSVKAPVTKVAASIGNAQKLPMCDKCGTGIVGVFVKLRDRHRHPECYVCTDCGTNLKQKGHFFVEDQIYCEKHARERVTPPEGYEVVTVFPK

SEQ ID NO: 404 - DNA, 1462 bp, Homo sapiens
gcccgcgccgcgccgctctttctccgacagctgccgggggtgccctgcaagctgttccgcgcgtcctgcccgtctgtccccgcgggtcgtcgcccgccacagccgcgccatgaccacccagcagatagacctccagggcccggggccgtggggcttccgcctcgtgggcggcaaggacttcgagcagcctctcgccatttcccgggtcactcctggaagcaaggcggctctagctaatttatgtattggagatgtaatcacagccattgatggggaaaatactagcaatatgacacacttggaagctcagaacagaatcaaaggctgcacagacaacttgactctcactgtagccagatctgaacataaagtctggtctcctctggtgacggaggaagggaagcgtcatccatacaagatgaatttagcctctgaaccccaggaggtcctgcacataggaagcgcccacaaccgaagtgccatgccctttaccgcctcgcctgcctccagcactactgccagggtcatcacaaaccagtacaacaacccagctggcctctactcttctgaaaatatctccaacttcaacaatgccctggagtcaaagactgctgccagcggggtggaggcgaacagcagacccttagaccatgctcagcctccaagcagccttgtcatcgacaaagaatctgaagtttacaagatgcttcaggagaaacaggagttgaatgagcccccgaaacagtccacgtctttcttggttttgcaggaaatcctggagtctgaagaaaaaggggatcccaacaagccctcaggattcagaagtgttaaagctcctgtcactaaagtggctgcgtcgattggaaatgctcagaagttgcctatgtgtgacaaatgtggcactgggattgttggtgtgtttgtgaagctgcgggaccgtcaccgccaccctgagtgttatgtgtgcactgactgtggcaccaacctgaaacagaagggccatttctttgtggaggatcaaatctactgtgagaagcatgcccgggagcgagtcacaccacctgagggttatgaagtggtcactgtgttccccaagtgagccagcagatctgaccactgttctccagcaggcctctgctgcagctttttctctcagtgttctggccctctcctctcttgaaagttctctgcttactttggttttccctctgcttgtaaaacattgagtcccctccctgccttggttaattgactcacaccagctgtgcgatgcccgcttttacaattaaaggaaaactgttttgttcagtgtcaccttgtcagcaacactgtgtcccttcgccccaccgttcttctctgctgcatttggacatcagccaaatttgaacccaatcaaatataacgtgtctgacactgattttgtttttactcaataaatgtatagactacaaaaaaaaaaaaa

SEQ ID NO: 405 - protein, 46 aa, Homo sapiens
MNLQKVSPVPSSRWRVTWPRAARKRNISSNDSQAPRSLFLAPSLTR

SEQ ID NO: 406 - DNA, 1076 bp, Homo sapiens
gccacctcggccgtggcaggaaccgaaacccggagcggccgaagctcagcgctccgctggggcagagggtcgcggcggctgggaacgccgctccccgacgcaccggccgcccccagcgcagcgcgctccgcggggtgctgatctgcctcttctccaagaaactcaaccactagtgacaatgaccagcctcctgactactccttctccaagagaagaactgatgaccaccccaattttacagcccactgaggccctgtccccagaagatggagccagcacagcactcattgcagttgttatcaccgttgtcttccttaccctgctctcggtcgtgatcttgatcttcttttacctgtacaagaacaaaggcagctacgtcacctatgaacctacagaaggtgagcccagtgccatcgtccagatggagagtgacttggccaagggcagcgagaaagaggaatatttcatctaatgactcccaggccccaaggagcttattcctggctccatcgctaacacgttgactgcttattatgggaaagttttctctgaagccagggagaagcattgattgatgtgggcaaatccaagctccagccaggtcgcagtcccaaatgccgacatcactgactccagggaccagggacatggagaaagctgtttatgatatctttaaccaggccctcttactagagctggtgtttgtgactggccaacaagatgtggctatgccaggggacatctgagtatgtgcccagtcatcttttttcacaggttgaagggagagaaaagattttgagttaaggtcattggctgctctactctgtcccctacctggtcacctagtgatagccccagtggagatactgtccatacaaggtcttcccagaggctggataccacagtaaaaggccaggccaggaggggtaggagactatggagatcttacctcctgataaatgtgctacaccccctaatctgagcccttcctttccgtgttccccaacaacctcatgcttacgtgatttttattcaaattaaaaattttcattgctacaaaaaaaaaaaaaaaaaaa

SEQ ID NO: 407 - DNA, 809 bp, Homo sapiens
tttttttttttttttttttttttttttggctctagagggggtagagggggtgctatagggagttgcttggaggttggcggccggggctgaaggtagcaaaccgagcgatcatgtcgcacaaacaaatttactattcggacaaatacgacgacgaggagtttgagtatcgacatgtcatgctgcccaaggacatagccaagctggtccctaaaacccatctgatgtctgaatctgaatggaggaatcttggcgttcagcagagtcagggatgggtccattatatgatccatgaaccagaacctcacatcttgctgttccggcgcccactacccaagaaaccaaagaaatgaagctggcaagctacttttcagcctcaagctttacacagctgtccttacttcctaacatctttctgataacattattatgttgccttctagtttctcactttgatatttaaaagatgttcaatacactgtatgaatgtgctggtaactgctttgcttcttgagtagagccacccacaccatagcccagccagaatgagtgctctgtggacccacagcctaagctgagtgtgaccccaaagccccgatgtgccccggaatccagaccaccttggcagatggagggaagcctccgaatttgaggaacatggctgtaacagggatcaggaaaactggcgttttggggtttatccccccggggttgaagtgagggggactgcggatttaaggttcaggtaacggaaaactttcacattattcaagaaacctggtcaggttaaaagccctgataaagagggagtt

SEQ ID NO: 408 - protein, 531 aa, Homo sapiens
RVYADAPAKLLLPPPAAWDLAVRLRGAEAASERQVYSVTMKLLLLHPAFQSCLLLTLLGLWRTTPEAHASSLGAPAISAASFLQDLIHRYGEGDSLTLQQLKALLNHLDVGVGRGNVTQHVQGHRNLSTCFSSGDLFTAHNFSEQSRIGSSELQEFCPTILQQLDSRACTSENQENEENEQTEEGRPSAVEVWGYGLLCVTVISLCSLLGASVVPFMKKTFYKRLLLYFIALAIGTLYSNALFQLIPEAFGFNPLEDYYVSKSAVVFGGFYLFFFTEKILKILLKQKNEHHHGHSHYASESLPSKKDQEEGVMEKLQNGDLDHMIPQHCSSELDGKAPMVDEKVIVGSLSVQDLQASQSACYWLKGVRYSDIGTLAWMITLSDGLHNFIDGLAIGASFTVSVFQGISTSVAILCEEFPHELGDFVILLNAGMSIQQALFFNFLSACCCYLGLAFGILAGSHFSANWIFALAGGMFLYISLADMFPEMNEVCQEDERKGSILIPFIIQNLGLLTGFTIMVVLTMYSGQIQIG

SEQ ID NO: 409 - DNA, 4573 bp, Homo sapiens
cgcgtgtctacgcggacgcaccggctaagctgcttctgccgccgccggccgcctgggaccttgcggtgaggctgcgcggggccgaggccgcctccgagcgccaggtttattcagtcaccatgaagctgctgctgctgcacccggccttccagagctgcctcctgctgaccctgcttggcttatggagaaccacccctgaggctcacgcttcatccctgggtgcaccagctatcagcgctgcctccttcctgcaggatctaatacatcggtatggcgagggtgacagcctcactctgcagcagctgaaggccctgctcaaccacctggatgtgggagtgggccggggtaatgtcacccagcacgtgcaaggacacaggaacctctccacgtgctttagttctggagacctcttcactgcccacaatttcagcgagcagtcgcggattgggagcagcgagctccaggagttctgccccaccatcctccagcagctggattcccgggcctgcacctcggagaaccaggaaaacgaggagaatgagcagacggaggaggggcggccaagcgctgttgaagtgtggggatacggtctcctctgtgtgaccgtcatctccctctgctccctcctgggggccagcgtggtgcccttcatgaagaagaccttttacaagaggctgctgctctacttcatagctctggcgattggaaccctctactccaacgccctcttccagctcatcccggaggcatttggtttcaaccctctggaagattattatgtctccaagtctgcagtggtgtttgggggcttttatcttttctttttcacagagaagatcttgaagattcttcttaagcagaaaaatgagcatcatcatggacacagccattatgcctctgagtcgcttccctccaagaaggaccaggaggagggggtgatggagaagctgcagaacggggacctggaccacatgattcctcagcactgcagcagtgagctggacggcaaggcgcccatggtggacgagaaggtcattgtgggctcgctctctgtgcaggacctgcaggcttcccagagtgcttgctactggctgaaaggtgtccgctactctgatatcggcactctggcctggatgatcactctgagcgacggcctccacaatttcatcgatggcctggccatcggtgcttccttcactgtgtcagttttccaaggcatcagcacctcggtggccatcctctgtgaggagttcccacatgagctaggagactttgtcatcctgctcaacgctgggatgagcatccaacaagctctcttcttcaacttcctttctgcctgctgctgctacctgggtctggcctttggcatcctggccggcagccacttctctgccaactggatttttgcgctagctggaggaatgttcttgtatatttctctggctgatatgttccctgagatgaatgaggtctgtcaagaggatgaaaggaagggcagcatcttgattccatttatcatccagaacctgggcctcctgactggattcaccatcatggtggtcctcaccatgtattcaggacagatccagattgggtagggctctgccaagagcctgtgggactggaagtcgggccctgggctgcccgatcgccagcccgaggacttaccatccacaatgcaccacggaagaggccgttctatgaaaaactgacacagactgtattcctgcattcaaatgtcagccgtttgtaaaatgctgtatcctaggaataagctgccctggtaaccagtctctagctagtgcctcttgccctctcctcacctccttttctctcagtgactctggaacctgaatgcagcttacaagacaagcctgacttttttctctgattaccttggcctcctcttggaaccagtgctgaaaggttttgaatcctttacccaacaatgcaaaaatagagccaatggttataacttggctagaaatatcaagagttgaatccatagtgtggggcccatgactctagctgggcaccttggacctccagctggccaatagaagagacaggagacaggaagccttcccattttttcaaagtctgtttaattgcctattacttctctcaaagagaacctgaagtcagaacacatgagcagggtgagaggtgaggcaaggttcatcctgaatgggagaggaagtcgaaccactgctgtgtgtcttgtcaggatgctcacttgttcctactgagatgctggatattgattttgtaacagcacctggtgtttcacggctgtccgagtgagctaacgtggcggtgtggctgcctggacctcctctttcaggttaacgctgacagaatggaggctcaggctgtctgcaagaaaacagttggtttggctgtgattttgacctcctcttccccactgccatcttctaagagactttgtagctgcctcctagaagcacattctgagcacatttgagacctctgtgttagaggggagactgcacaaactatcctcccccaggttgagacgtctgcagagtggcaagctgacttgtagaaatggggtgccatttatgctctacttagacaagggtaatcagaaatggaatcagtgcaggcaaaatttaggatttgccgcttccataaatcaaagcatgactaatagggggtctctgaaatgtaagggcacaaacttcacttagggcatcgcagatgtttgcagaatggttggcctaatgattatgctacagatgggttttaaatgacccgtctaggttactgcttccttgcaaaaaaagtcgaatcctgcattgaattgaatatgaatttctctaactctctccagaaaatggatggagataacttgtctttaaaactgtaggccagccttagccactgtggagcccttgcctccgagctctggcttcaaggggagctcttctccaggttcactaggtgaattgatttattattatcatattgataatgtgagattctttagccactttggggagcctgtctctccagaagcctttcttagtggtgcccacagttggagcccaggggccatgtttgcaaactgattcatgtgcatggctgacaggagtactggttcactaccaatgcctgagcttttctcttacatagaaaaactgtccactctcagtaatcacaagcagcatccgttttgttttctcttcttgggagacatctgtcaaaccaggaatattcttgaaaagaacgtgagcaggaaaaactgctggtgatactttttttaagttttgtttttatcttgcctgttggcttcaatacatttgagaatacgctgaagagggaaaatttcagtgatggagattctagattaaatatcaggactgatttcctggtgggattatggtccagttttaccaaagaaccaattccttgaatgttggaatctaactttttatattgtcattattattgttgtttttaaacggttctttgtcttttctgttttatttttctcaagctgctttcaggagctagcagaaaataactcaaagttgaagactctggaagattttgctttaacctaactcgcattgatgtattaaatttataattttagcattcccaatagatcctatcattccttaaacataataccctttgtcttggagtagaatactaagttagagttagtggatttctagtttaggagaggagctcaaaactataatctttaacaaattgaaaaatgaaatagggtgttttccctttttgtgcacacctatattaccttaagaaatttccttccatagacagctgcctcaaagggaaatcctctttaaaccgtagttggcgcagaggtcagtcctagtcggagcttaggaggggcggagacgctcacatcgtctgacttgagtcgccactgattgtggcaacagctttgcctcatgagtcaaaaattggcaatttcttttgatttttagttgttgaatttgctgtttcaagcatttgtacatattagaagtctaaggagtagcaagtcagtgggaggactttttcacccctggcattagcagcttcgacctcattttccagatgcaccagctcctattaataagttagcaaggaaagtgtatgtcacgtgcaggaacagtgaggcagggacaggggttctgctccttctcacttcaccaccggcacacagcttgcccctgtctttgcccccaaaggtattttgtgtctagtgtcaaattggagctattcttcactggtccttaaccttgggttttaaaaagaaggcttctctgtttgggtagcgtaagagctgagtatagtaagtcctcttccaaagagatggcaatatgctgggcatctactttaaaacaaagttgtctgatttttgcaagagaggttaggattttattgttcttatttccctttacagttctgcagttccatcacagtatttttttaaataactcaggtgtatgagcagaaattagaaaagaaaattaacttatgtggactgtaaatgttttatttgtaagattctataaataaagctatattctgt

SEQ ID NO: 410 - protein, 421 aa, Homo sapiens
MAAGFGRCCRVLRSISRFHWRSQHTKANRQREPGLGFSFEFTEQQKEFQATARKFAREEIIPVAAEYDKTGEYPVPLIRRAWELGLMNTHIPENCGGLGLGTFDACLISEELAYGCTGVQTAIEGNSLGQMPIIIAGNDQQKKKYLGRMTEEPLMCAYCVTEPGAGSDVAGIKTKAEKKGDEYIINGQKMWITNGGKANWYFLLARSDPDPKAPANKAFTGFIVEADTPGIQIGRKELNMGQRCSDTRGIVFEDVKVPKENVLIGDGAGFKVAMGAFDKTRPVVAAGAVGLAQRALDEATKYALERKTFGKLLVEHQAISFMLAEMAMKVELARMSYQRAAWEVDSGRRNTYYASIAKAFAGDIANQLATDAVQILGGNGFNTEYPVEKLMRDAKIYQIYEGTSQIQRLIVAREHIDKYKN

SEQ ID NO: 411 - DNA, 822 bp, Homo sapiens
atatttttcttgcagatttatgaaggtacttcacaaattcaaagacttattgtagcccgtgaacacattgacaagtacaaaaattaaaaaaattactgtagaaatattgaataactagaacacaagccactgtttcagctccagaaaaaagaaagggctttaacgttttttccagtgaaaacaaatcctcttatattaaatctaagcaactgcttattatagtagtttatacttttgcttaactctgttatgtctcttaagcaggtttggtttttattaaaatgatgtgttttctttagtaccactttacttgaattacattaacctagaaaactacataggttattttgatctcttaagattaatgtagcagaaatttcttggaattttatttttgtaatgacagaaaagtgggcttagaaagtattcaagatgttacaaaatttacatttagaaaatattgtagtatttgaatactgtcaacttgacagtaactttgtagacttaatggtattattaaagttctttttattgcagtttggaaagcatttgtgaaactttctgtttggcacagaaacagtcaaaattttgacattcatattctcctattttacagctacaagaactttcttgaaaatcttatttaattctgagcccatatttcacttaccttatttaaaataaatcaataaagcttgccttaaattatttttatatgactgttggtctctaggtagcctttggtctattgtacacaatctcatttcatatgtttgcattttggcaaagaacttaataaaattgttcagtgcttattatcat

SEQ ID NO: 412 - protein, 382 aa, Homo sapiens
MGDWSALGKLLDKVQAYSTAGGKVWLSVLFIFRILLLGTAVESAWGDEQSAFRCNTQQPGCENVCYDKSFPISHVRFWVLQIIFVSVPTLLYLAHVFYVMRKEEKLNKKEEELKVAQTDGVNVDMHLKQIEIKKFKYGIEEHGKVKMRGGLLRTYIISILFKSIFEVAFLLIQWYIYGFSLSAVYTCKRDPCPHQVDCFLSRPTEKTIFIIFMLVVSLVSLALNIIELFYVFFKGVKDRVKGKSDPYHATSGALSPAKDCGSQKYAYFNGCSSPTAPLSPMSPPGYKLVTGDRNNSSCRNYNKQASEQNWANYSAEQNRMGQAGSTISNSHAQPFDFPDDNQNSKKLAAGHELQPLAIVDQRPSSRASSRASSRPRPDDLEI

SEQ ID NO: 413 - DNA, 3088 bp, Homo sapiens
acaaaaaagcttttacgaggtatcagcacttttctttcattagggggaaggcgtgaggaaagtaccaaacagcagcggagttttaaactttaaatagacaggtctgagtgcctgaacttgccttttcattttacttcatcctccaaggagttcaatcacttggcgtgacttcactacttttaagcaaaagagtggtgcccaggcaacatgggtgactggagcgccttaggcaaactccttgacaaggttcaagcctactcaactgctggagggaaggtgtggctgtcagtacttttcattttccgaatcctgctgctggggacagcggttgagtcagcctggggagatgagcagtctgcctttcgttgtaacactcagcaacctggttgtgaaaatgtctgctatgacaagtctttcccaatctctcatgtgcgcttctgggtcctgcagatcatatttgtgtctgtacccacactcttgtacctggctcatgtgttctatgtgatgcgaaaggaagagaaactgaacaagaaagaggaagaactcaaggttgcccaaactgatggtgtcaatgtggacatgcacttgaagcagattgagataaagaagttcaagtacggtattgaagagcatggtaaggtgaaaatgcgaggggggttgctgcgaacctacatcatcagtatcctcttcaagtctatctttgaggtggccttcttgctgatccagtggtacatctatggattcagcttgagtgctgtttacacttgcaaaagagatccctgcccacatcaggtggactgtttcctctctcgccccacggagaaaaccatcttcatcatcttcatgctggtggtgtccttggtgtccctggccttgaatatcattgaactcttctatgttttcttcaagggcgttaaggatcgggttaagggaaagagcgacccttaccatgcgaccagtggtgcgctgagccctgccaaagactgtgggtctcaaaaatatgcttatttcaatggctgctcctcaccaaccgctcccctctcgcctatgtctcctcctgggtacaagctggttactggcgacagaaacaattcttcttgccgcaattacaacaagcaagcaagtgagcaaaactgggctaattacagtgcagaacaaaatcgaatggggcaggcgggaagcaccatctctaactcccatgcacagccttttgatttccccgatgataaccagaattctaaaaaactagctgctggacatgaattacagccactagccattgtggaccagcgaccttcaagcagagccagcagtcgtgccagcagcagacctcggcctgatgacctggagatctagatacaggcttgaaagcatcaagattccactcaattgtggagaagaaaaaaggtgctgtagaaagtgcaccaggtgttaattttgatccggtggaggtggtactcaacagccttattcatgaggcttagaaaacacaaagacattagaatacctaggttcactgggggtgtatggggtagatgggtggagagggaggggataagagaggtgcatgttggtatttaaagtagtggattcaaagaacttagattataaataagagttccattaggtgatacatagataagggctttttctccccgcaaacacccctaagaatggttctgtgtatgtgaatgagcgggtggtaattgtggctaaatatttttgttttaccaagaaactgaaataattctggccaggaataaatacttcctgaacatcttaggtcttttcaacaagaaaaagacagaggattgtccttaagtccctgctaaaacattccattgttaaaatttgcactttgaaggtaagctttctaggcctgaccctccaggtgtcaatggacttgtgctactatatttttttattcttggtatcagtttaaaattcagacaaggcccacagaataagattttccatgcatttgcaaatacgtatattctttttccatccacttgcacaatatcattaccatcactttttcatcattcctcagctactactcacattcatttaatggtttctgtaaacatttttaagacagttgggatgtcacttaacattttttttttttgagctaaagtcagggaatcaagccatgcttaatatttaacaatcacttatatgtgtgtcgaagagtttgttttgtttgtcatgtattggtacaagcagatacagtataaactcacaaacacagatttgaaaataatgcacatatggtgttcaaatttgaacctttctcatggatttttgtggtgtgggccaatatggtgtttacattatataattcctgctgtggcaagtaaagcacactttttttttctcctaaaatgtttttccctgtgtatcctattatggatactggttttgttaattatgattctttattttctctcctttttttaggatatagcagtaatgctattactgaaatgaatttcctttttctgaaatgtaatcattgatgcttgaatgatagaattttagtactgtaaacaggctttagtcattaatgtgagagacttagaaaaaatgcttagagtggactattaaatgtgcctaaatgaattttgcagtaactggtattcttgggttttcctacttaatacacagtaattcagaacttgtattctattatgagtttagcagtcttttggagtgaccagcaactttgatgtttgcactaagattttatttggaatgcaagagaggttgaaagaggattcagtagtacacatacaactaatttatttgaactatatgttgaagacatctaccagtttctccaaatgccttttttaaaactcatcacagaagattggtgaaaatgctgagtatgacacttttcttcttgcatgcatgtcagctacataaacagttttgtacaatgaaaattactaatttgtttgacattccatgttaaactacggtcatgttcagcttcattgcatgtaatgtagacctagtccatcagatcatgtgttctggagagtgttctttattcaataaagttttaatttagtataaacat

SEQ ID NO: 414 - protein, 246 aa, Homo sapiens
MYQVSGQRPSGCDAPYGAPSAAPGPAQTLSLLPGLEVVTGSTHPAEAAPEEGSLEEAATPMPQGNGPGIPQGLDSTDLDVPTEAVTCQPQGNPLGCTPLLPNDSGHPSELGGTRRAGNGALGGPKAHRKLQTHPSLASQGSKKSKSSSKSTTSQIPLQAQEDCCVHCILSCLFCEFLTLCNIVLDCATCGSCSSEDSCLCCCCCGSGECADCDLPCDLDCGILDACCESADCLEICMECCGLCFSS

SEQ ID NO: 415 - DNA, 1558 bp, Homo sapiens
cagcgagtgagaggggaaggggcgccaggcgagcacccgggagccagcgggacctgggcaggggcgcccggagcaggcgcgcatggcgggccccgcgcggggatccggctggaagagagcgtagcacggctcgcacgagtccggggccgatgtaccaggtgagcggccagcgcccctctggctgcgacgcgccctatggagcccccagcgcagccccgggcccagcccagaccctatccctccttcctgggctggaggtagtaacaggatccactcaccctgcggaggcagcaccagaggagggctccctggaggaggcggcaacccccatgccccaaggcaatggccctggcatcccccagggcctggacagcactgacctcgacgtccccacagaagctgttacatgccagcctcaggggaaccccttgggctgcaccccacttctgccgaatgactctggccacccctcagagctgggcggcaccagacgggcggggaatggtgccctgggtggccccaaggcccaccggaagttgcagacacacccatctctcgccagccagggcagcaagaagagtaagagcagcagcaaatccaccacctcccagatccccctccaggcacaggaagactgctgtgtccactgcatcctgtcctgcctgttctgcgagttcctgacgctgtgcaacatcgtcctggactgcgccacctgtggctcctgcagctcggaggactcgtgcctctgctgctgctgctgtggctctggcgagtgtgccgactgcgacctgccctgcgacctggactgcggcatcctggatgcctgctgcgagtccgcggactgcctggagatctgcatggagtgctgtgggctctgcttctcctcctgagcctctgtcgggggctaagccagcctggcgcccctgcagattccagcagggtccctctgagtggggccaggcccaggactgtcacacaaggcttgagaagccccctctccctggtcctctcctacccacccatgtcctctcagaaccccagccttgaaaatagtggggggcactcagaggggccacctcctcagccgtgggtggtgggcccatggcagagaagcctgaactctttactgggttaccaggttcatacattgctgaggacctgacaggacaacctaggggcagggctggggtgggggccgcagagggcagccagggctggggaacactgtgaaagttacttggggagggtgggccggtggggccgtagctctctacctctccctgctcctggtgcctgcctctctcctccaccccaggcttagaggacagaaaaatgtgaagagacgccccacccaccctcagccagccctctccagtctcctttcctaggcttttttgggggcctaacccacgcagtcaccccagagggcagggctaggcgagagcctggggtggggcgggagggggaacagtatggaaaagactggaaggggaaaggaagggaagggagggaggtctgttctatctgttgctgtaaataaagatatttgtccatctct

SEQ ID NO: 416 - protein, 708 aa, Homo sapiens
MSTADALDDENTFKILVATDIHLGFMEKDAVRGNDTFVTLDEILRLAQENEVDFILLGGDLFHENKPSRKTLHTCLELLRKYCMGDRPVQFEILSDQSVNFGFSKFPWVNYQDGNLNISIPVFSIHGNHDDPTGADALCALDILSCAGFVNHFGRSMSVEKIDISPVLLQKGSTKIALYGLGSIPDERLYRMFVNKKVTMLRPKEDENSWFNLFVIHQNRSKHGSTNFIPEQFLDDFIDLVIWGHEHECKIAPTKNEQQLFYISQPGSSVVTSLSPGEAVKKHVGLLRIKGRKMNMHKIPLHTVRQFFMEDIVLANHPDIFNPDNPKVTQAIQSFCLEKIEEMLENAERERLGNSHQPEKPLVRLRVDYSGGFEPFSVLRFSQKFVDRVANPKDIIHFFRHREQKEKTGEEINFGKLITKPSEGTTLRVEDLVKQYFQTAEKNVQLSLLTERGMGEAVQEFVDKEEKDAIEELVKYQLEKTQRFLKERHIDALEDKIDEEVRRFRETRQKNTNEEDDEVREAMTRARALRSQSEESASAFSADDLMSIDLAEQMANDSDDSISAATNKGRGRGRGRRGGRGQNSASRGGSQRGRADTGLETSTRSRNSKTAVSASRNMSIIDAFKSTRQQPSRNVTTKNYSEVIEVDESDVEEDIFPTTSKTDQRWSSTSSSKIMSQSQVSKGVDFESSEDDDDDPFMNTSSLRRNRR

SEQ ID NO: 417 - DNA, 4852 bp, Homo sapiens
  misc_feature (4260)..(4260): n = a, c, g, or t
ggacgccgttctctcccgcggaattcaggtttacggccctgcgggttctcagagaatttctagaatttggaatcgagtgcattttctgacatttgagtacagtacccaggggttcttggagaagaacctggtcccagaggagcttgactgaccataaaaatgagtactgcagatgcacttgatgatgaaaacacatttaaaatattagttgcaacagatattcatcttggatttatggagaaagatgcagtcagaggaaatgatacgtttgtaacactcgatgaaattttaagacttgcccaggaaaatgaagtggattttattttgttaggtggtgatctttttcatgaaaataagccctcaaggaaaacattacatacctgcctcgagttattaagaaaatattgtatgggtgatcggcctgtccagtttgaaattctcagtgatcagtcagtcaactttggttttagtaagtttccatgggtgaactatcaagatggcaacctcaacatttcaattccagtgtttagtattcatggcaatcatgacgatcccacaggggcagatgcactttgtgccttggacattttaagttgtgctggatttgtaaatcactttggacgttcaatgtctgtggagaagatagacattagtccggttttgcttcaaaaaggaagcacaaagattgcgctatatggtttaggatccattccagatgaaaggctctatcgaatgtttgtcaataaaaaagtaacaatgttgagaccaaaggaagatgagaactcttggtttaacttatttgtgattcatcagaacaggagtaaacatggaagtactaacttcattccagaacaatttttggatgacttcattgatcttgttatctggggccatgaacatgagtgtaaaatagctccaaccaaaaatgaacaacagctgttttatatctcacaacctggaagctcagtggttacttctctttccccaggagaagctgtaaagaaacatgttggtttgctgcgtattaaagggaggaagatgaatatgcataaaattcctcttcacacagtgcggcagtttttcatggaggatattgttctagctaatcatccagacatttttaacccagataatcctaaagtaacccaagccatacaaagcttctgtttggagaagattgaagaaatgcttgaaaatgctgaacgggaacgtctgggtaattctcaccagccagagaagcctcttgtacgactgcgagtggactatagtggaggttttgaacctttcagtgttcttcgctttagccagaaatttgtggatcgggtagctaatccaaaagacattatccattttttcaggcatagagaacaaaaggaaaaaacaggagaagagatcaactttgggaaacttatcacaaagccttcagaaggaacaactttaagggtagaagatcttgtaaaacagtactttcaaaccgcagagaagaatgtgcagctctcactgctaacagaaagagggatgggtgaagcagtacaagaatttgtggacaaggaggagaaagatgccattgaggaattagtgaaataccagttggaaaaaacacagcgatttcttaaagaacgtcatattgatgccctcgaagacaaaatcgatgaggaggtacgtcgtttcagagaaaccagacaaaaaaatactaatgaagaagatgatgaagtccgtgaggctatgaccagggccagagcactcagatctcagtcagaggagtctgcttctgcctttagtgctgatgaccttatgagtatagatttagcagaacagatggctaatgactctgatgatagcatctcagcagcaaccaacaaaggaagaggccgaggaagaggtcgaagaggtggaagagggcagaattcagcatcgagaggagggtctcaaagaggaagagcagacactggtctggagacttctacccgtagcaggaactcaaagactgctgtgtcagcatctagaaatatgtctattatagatgcctttaaatctacaagacagcagccttcccgaaatgtcactactaagaattattcagaggtgattgaggtagatgaatcagatgtggaagaagacatttttcctaccacttcaaagacagatcaaaggtggtccagcacatcatccagcaaaatcatgtcccagagtcaagtatcgaaaggggttgattttgaatcaagtgaggatgatgatgatgatccttttatgaacactagttctttaagaagaaatagaagataatatatttaatggcactgagaaacatgcaagatacaggaaaaatgaaaatgttacaagctaagagtttacagtttaagattttaagtattgtttcctgagcataactccataagtaagaaatttctagttcacagacatacaatagcattgattcaccttgtttttttaacctggttgttgtagtaagagctttgtttcaatatcactcttgagtaaagattaaaataaagctaccattttacatttctatttcataatgaaaaactatgtcagtattttaatatggttacatttagccaaagttgagggaaagagcttataaaatttaacttcttcataattttagtaatttcctagaggttctgggttttctgaaagtaaaacaatttatgcgaacctatgtctaaattcactgtttgttactatgtatgtttttttccaatgcttcttataagactaaatgattagaagtacctaatagtttgaacagatatgtttttatttaaaagagtagaataacctttcagaattactgagttttttattccagttgtagcaaagatttcaaaagattgtgttcccattaagtggtagtaatttcctttattattctgtatccttaatggtgttctctctctctctctctctctctctctctccctctcccccccgttccccactattcctttctccttggctttttcttctctttcatacatatatgcgtgcctagttctaggaggaaacgggttaaaaattgttttaaactacatcttgaaaatattgaagaatttgttttaggtagagtggtcagttgaaccttacagtaaagtatagaaatatatttaatgtggaatgtcaatgccaggatttctcattaacaatattttatctcaactttggttcctgtgatacatttctgaatgggcaattccagaaatcttagtagcccatgttaagcttctattttttacttgttttcggggagaaataagaattagacatcttcagatttaagttaaataatcccattctttataatcctctgtaaaaagatccctgagattattccttcttctagttttatgcgacagctttactttaaaattcaagttatacatcttgggagtacaatggcccgacatttcttcataggtagaaacaaatacttgactcagtgatactcatgaccattagaatagtcatacctggaatgtgtcaaattataagagacagacacttggttagtggctgcctcatatagcacttttgaagaggcctaagtcaaaacttgcaatataacattctattgactttcttaaaaatattttttctgtacctaacttgagcataagggttatttgagcaagtaacattaactcagtggaaggcattgtcctgtgaaatattcttaggcagatctgcccacatctttattgaacttgaaatctaatatttctagtatttgaacaaagcagaaggttaagtcagggaagagcagtgctgtccatgatgtaatggaagctaccaggggaggcagtgtctggatgatgctgtgctacctacccctgcacaagccatgctggctcagtctgagctgtgggccacatcagctagtggctcttctcatgcatcagttaggtgggtctgggtgagagttatagtgagggaatggtcactaaagtatcctgacaagttcctaggaaaaaaggaataaagtttttttccttaaaaaaaaaaaaattgctcttggctgtgaaaagaggtactaaatgcgattcagttcaccgctaaggaaagtgatgacatagcagttacagagggtgataaatctctccagctaattcaggtcattttgtgaatactatgtatcaagccctgaaaatatggtaaataaaacgtgacagggaaacctttttttgattgaatattgttacatagttaaatgtgctatatatccttaatattttatantgatcctgcaaaatctgttggttttaggggagttttgttttttgtttctaacaattttcagacctgttggtataggaatgtagaagtctttcagatgattgaaagcagctgcatttgctcttggaggctttgggagagcaggaatgaaaacattcagaggaagacatctgtagggaattcttctgttacttaccaaagaataagtgtctttctggtgttttatttcctatcataaaaatacaacagtgcatttacaaggttaaagattcctcgaagttctaggaaattcttgaaaatataagtggtgcttagaaaattcaagcatttaggaatgtgacctttaattcaggtatgtaaaagacttttttcccaaacttttaaaagtaggaaatacaataaatacagaaaagtcatatggttgaataaataattataaattgagcactgatggaatccctctacaggtcaagaaatagcgcagtgtcctggatgcccattatattgttttctcctttctgggtaacaggccctaacttctgtaatttaaaagctcctacttttgccacaaggtggtgcttctgccattagacgc

SEQ ID NO: 418 - protein, 423 aa, Homo sapiens
MAMVVSSWRDPQDDVAGGNPGGPNPAAQAARGGGGGAGEQQQQAGSGAPHTPQTPGQPGAPATPGTAGDKGQGPPGSGQSQQHIECVVCGDKSSGKHYGQFTCEGCKSFFKRSVRRNLTYTCRANRNCPIDQHHRNQCQYCRLKKCLKVGMRREAVQRGRMPPTQPNPGQYALTNGDPLNGHCYLSGYISLLLRAEPYPTSRYGSQCMQPNNIMGIENICELAARLLFSAVEWARNIPFFPDLQITDQVSLLRLTWSELFVLNAAQCSMPLHVAPLLAAAGLHASPMSADRVVAFMDHIRIFQEQVEKLKALHVDSAEYSCLKAIVLFTSDACGLSDAAHIESLQEKSQCALEEYVRSQYPNQPSRFGKLLLRLPSLRTVSSSVIEQLFFVRLVGKTPIETLIRDMLLSGSSFNWPYMSIQCS

SEQ ID NO: 419 - DNA, 1667 bp, Homo sapiens
ggcacgaggcttccccttcccctcccagcgcgcccgcgcgccccgcggccctcggcgagcagctcggctccccccagcgctccccgggcccaaagatatggcaatggtagttagcagctggcgagatccgcaggacgacgtggccgggggcaaccccggcggccccaaccccgcagcgcaggcggcccgcggcggcggcggcggcgccggcgagcagcagcagcaggcgggctcgggcgcgccgcacacgccgcagaccccgggccagcccggagcgcccgccacccccggcacggcgggggacaagggccagggcccgcccggttcgggccagagccagcagcacatcgagtgcgtggtgtgcggggacaagtcgagcggcaagcactacggccaattcacctgcgagggctgcaaaagtttcttcaagaggagcgtccgcaggaacttaacttacacatgccgtgccaacaggaactgtcccatcgaccagcaccaccgcaaccagtgccaatactgccgcctcaagaagtgcctcaaagtgggcatgaggcgggaagcggttcagcgaggaagaatgcctccaacccagcccaatccaggccagtacgcactcaccaacggggaccccctcaacggccactgctacctgtccggctacatctcgctgctgctgcgcgccgagccctaccccacgtcgcgctacggcagccagtgcatgcagcccaacaacattatgggcatcgagaacatctgcgagctggccgcgcgcctgctcttcagcgccgtcgagtgggcccgcaacatccccttcttcccggatctgcagatcaccgaccaggtgtccctgctacgcctcacctggagcgagctgttcgtgctcaacgcggcccagtgctctatgccgctgcacgtggcgccgttgctggccgccgccggcctgcatgcctcgcccatgtctgccgaccgcgtcgtggccttcatggaccacatccgcatcttccaggagcaggtggagaagctcaaggcgctacacgtcgactcagccgagtacagctgcctcaaagccatcgtgctgttcacgtcagacgcctgtggcctgtcggatgcggcccacatcgagagcctgcaggagaagtcgcagtgcgcactggaggagtacgtgaggagccagtaccccaaccagcccagccgttttggcaaactgctgctgcgactgccctcgctgcgcaccgtgtcctcctccgtcatcgagcagctcttcttcgtccgtttggtaggtaaaacccccatcgaaactctcatccgcgatatgttactgtctgggagcagcttcaactggccttacatgtccatccagtgctcctagaccttgggcgcttcccacctgccccgtccccctagagactcagaggacccacctgggccaaggactccaaagccgcggggacaccgggaagtgcagcgggccaggcaggctgggtgggagggaggagggccgagacaggagcagcccacccagcagaaatacaatccgagctacaaagcatgggaaaaagagactcttttaggatcagatctgtgagcacgttggcgaggaaaaacaaaacaaacaaaaaaaagaaccttgtgtctgtctggtgaaaaaaaaaaaaaaaaaaaaaaaa

SEQ ID NO: 420 - protein, 122 aa, Homo sapiens
MEASALTSSAVTSVAKVVRVASGSAVVLPLARIATVVIGGVVAMAAVPMVLSAMGFTAAGIASSSIAAKMMSAAAIANGGGVASGSLVGTLQSLGATGLSGLTKFILGSIGSAIAAVIARFY

SEQ ID NO: 421 - DNA, 597 bp, Homo sapiens
agctgaagttgaggatctcttactctctaagccacggaattaacccgagcaggcatggaggcctctgctctcacctcatcagcagtgaccagtgtggccaaagtggtcagggtggcctctggctctgccgtagttttgcccctggccaggattgctacagttgtgattggaggagttgtggccatggcggctgtgcccatggtgctcagtgccatgggcttcactgcggcgggaatcgcctcgtcctccatagcagccaagatgatgtccgcggcggccattgccaatgggggtggagttgcctcgggcagccttgtgggtactctgcagtcactgggagcaactggactctccggattgaccaagttcatcctgggctccattgggtctgccattgcggctgtcattgcgaggttctactagctccctgcccctcgccctgcagagaagagaaccatgccaggggagaaggcacccagccatcctgacccagcgaggagccaactatcccaaatatacctgggtgaaatataccaaattctgcatctccagaggaaaataagaaataaagatgaattgttgcaactcttaaaaaaa

SEQ ID NO: 422 - protein, 156 aa, Homo sapiens
MALEKSLVRLLLLVLILLVLGWVQPSLGKESRAKKFQRQHMDSDSSPSSSSTYCNQMMRRRNMTQGRCKPVNTFVHEPLVDVQNVCFQEKVTCKNGQGNCYKSNSSMHITDCRLTNGSRYPNCAYRTSPKERHIIVACEGSPYVPVHFDASVEDST

SEQ ID NO: 423 - DNA, 846 bp, Homo sapiens
gtataaggtccacaccccgggagctgagtgattgcagaaactggccttccatctctctcagacaccaagctgcagatccaggcttttctgggaaagtgaggccaccatggctctggagaagtctcttgtccggctccttctgcttgtcctgatactgctggtgctgggctgggtccagccttccctgggcaaggaatcccgggccaagaaattccagcggcagcatatggactcagacagttcccccagcagcagctccacctactgtaaccaaatgatgaggcgccggaatatgacacaggggcggtgcaaaccagtgaacacctttgtgcacgagcccctggtagatgtccagaatgtctgtttccaggaaaaggtcacctgcaagaacgggcagggcaactgctacaagagcaactccagcatgcacatcacagactgccgcctgacaaacggctccaggtaccccaactgtgcataccggaccagcccgaaggagagacacatcattgtggcctgtgaagggagcccatatgtgccagtccactttgatgcttctgtggaggactctacctaaggtcagagcagcgagataccccacctccctcaacctcatcctctccacagctgcctcttccctcttccttccctgctgtgaaagaagtaactacagttagggctcctattcaacacacacatgcttccctttcctgagtcccatccctgcgtgattttgggggtgaagagtgggttgtgaggtgggccccatgttaacccctccactctttctttcaataaaacgcagttgcaaacaataaaaaaaaaaaaaaaaaaaaaaaaaaaaaa

SEQ ID NO: 424 - protein, 163 aa, Homo sapiens
MSLLLLVVSALHILILILLFVATLDKSWWTLPGKESLNLWYDCTWNNDTKTWACSNVSENGWLKAVQVLMVLSLILCCLSFILFMFQLYTMRRGGLFYATGLCQLCTSVAVFTGALIYAIHAEEILEKHPRGGSFGYCFALAWVAFPLALVSGIIYIHLRKRE

SEQ ID NO: 425 - DNA, 817 bp, Homo sapiens
gaaggaggcccagacagtgagggcaggagggagagaagagacgcagaaggagagcgagcgagagagaaagggttctggattggaggggagagcaagggagggaggaaggcggtgagagaggcgggggcctcgggagggtgaaaggagggaggagaagggcggggcacggaggcccgagcgagggacaagactccgactccagctctgacttttttcgcggctctcggcttccactgcagccatgtcactcctcttgctggtggtctcagcccttcacatcctcattcttatactgcttttcgtggccactttggacaagtcctggtggactctccctgggaaagagtccctgaatctctggtacgactgcacgtggaacaacgacaccaaaacatgggcctgcagtaatgtcagcgagaatggctggctgaaggcggtgcaggtcctcatggtgctctccctcattctctgctgtctctccttcatcctgttcatgttccagctctacaccatgcgacgaggaggtctcttctatgccaccggcctctgccagctttgcaccagcgtggcggtgtttactggcgccttgatctatgccattcacgccgaggagatcctggagaagcacccgcgagggggcagcttcggatactgcttcgccctggcctgggtggccttccccctcgccctggtcagcggcatcatctacatccacctacggaagcgggagtgagcgccccgcctcgctcggctgcccccgccccttcccggcccccctcgccgcgcgtcctccaaaaaaataaaactttaacggcgg

SEQ ID NO: 426 - protein, 906 aa, Homo sapiens
MCRIAGALRTLLPLLAALLQASVEASGEIALCKTGFPEDVYSAVLSKDVHEGQPLLNVKFSNCNGKRKVQYESSEPADFKVDEDGMVYAVRSFPLSSEHAKFLIYAQDKETQEKWQVAVKLSLKPTLTEESVKESAEVEEIVFPRQFSKHSGHLQRQKRDWVIPPINLPENSRGPFPQELVRIRSDRDKNLSLRYSVTGPGADQPPTGIFIINPISGQLSVTKPLDREQIARFHLRAHAVDINGNQVENPIDIVINVIDMNDNRPEFLHQVWNGTVPEGSKPGTYVMTVTAIDADDPNALNGMLRYRIVSQAPSTPSPNMFTINNETGDIITVAAGLDREKVQQYTLIIQATDMEGNPTYGLSNTATAVITVTDVNDNPPEFTAMTFYGEVPENRVDIIVANLTVTDKDQPHTPAWNAVYRISGGDPTGRFAIQTDPNSNDGLVTVVKPIDFETNRMFVLTVAAENQVPLAKGIQHPPQSTATVSVTVIDVNENPYFAPNPKIIRQEEGLHAGTMLTTFTAQDPDRYMQQNIRYTKLSDPANWLKIDPVNGQITTIAVLDRESPNVKNNIYNATFLASDNGIPPMSGTGTLQIYLLDINDNAPQVLPQEAETCETPDPNSINITALDYDIDPNAGPFAFDLPLSPVTIKRNWTITRLNGDFAQLNLKIKFLEAGIYEVPIIITDSGNPPKSNISILRVKVCQCDSNGDCTDVDRIVGAGLGTGAIIAILLCIIILLILVLMFVVWMKRRDKERQAKQLLIDPEDDVRDNILKYDEEGGGEEDQDYDLSQLQQPDTVEPDAIKPVGIRRMDERPIHAEPQYPVRSAAPHPGDIGDFINEGLKAADNDPTAPPYDSLLVFDYEGSGSTAGSLSSLNSSSSGGEQDYDYLNDWGPRFKKLADMYGGGDD

SEQ ID NO: 427 - DNA, 4122 bp, Homo sapiens
tttgtcatcagctcgctctccattggcggggagcggagagcagcgaagaagggggtggggaggggaggggaagggaagggggtggaaactgcctggagccgtttctccgcgccgctgttggtgctgccgctgcctcctcctcctccgccgccgccgccgccgccgccgcctcctccggctcttcgctcggcccctctccgcctccatgtgccggatagcgggagcgctgcggaccctgctgccgctgctggcggccctgcttcaggcgtctgtagaggcttctggtgaaatcgcattatgcaagactggatttcctgaagatgtttacagtgcagtcttatcgaaggatgtgcatgaaggacagcctcttctcaatgtgaagtttagcaactgcaatggaaaaagaaaagtacaatatgagagcagtgagcctgcagattttaaggtggatgaagatggcatggtgtatgccgtgagaagctttccactctcttctgagcatgccaagttcctgatatatgcccaagacaaagagacccaggaaaagtggcaagtggcagtaaaattgagcctgaagccaaccttaactgaggagtcagtgaaggagtcagcagaagttgaagaaatagtgttcccaagacaattcagtaagcacagtggccacctacaaaggcagaagagagactgggtcatccctccaatcaacttgccagaaaactccaggggaccttttcctcaagagcttgtcaggatcaggtctgatagagataaaaacctttcactgcggtacagtgtaactgggccaggagctgaccagcctccaactggtatcttcattatcaaccccatctcgggtcagctgtcggtgacaaagcccctggatcgcgagcagatagcccggtttcatttgagggcacatgcagtagatattaatggaaatcaagtggagaaccccattgacattgtcatcaatgttattgacatgaatgacaacagacctgagttcttacaccaggtttggaatgggacagttcctgagggatcaaagcctggaacatatgtgatgaccgtaacagcaattgatgctgacgatcccaatgccctcaatgggatgttgaggtacagaatcgtgtctcaggctccaagcaccccttcacccaacatgtttacaatcaacaatgagactggtgacatcatcacagtggcagctggacttgatcgagaaaaagtgcaacagtatacgttaataattcaagctacagacatggaaggcaatcccacatatggcctttcaaacacagccacggccgtcatcacagtgacagatgtcaatgacaatcctccagagtttactgccatgacgttttatggtgaagttcctgagaacagggtagacatcatagtagctaatctaactgtgaccgataaggatcaaccccatacaccagcctggaacgcagtgtacagaatcagtggcggagatcctactggacggttcgccatccagaccgacccaaacagcaacgacgggttagtcaccgtggtcaaaccaatcgactttgaaacaaataggatgtttgtccttactgttgctgcagaaaatcaagtgccattagccaagggaattcagcacccgcctcagtcaactgcaaccgtgtctgttacagttattgacgtaaatgaaaacccttattttgcccccaatcctaagatcattcgccaagaagaagggcttcatgccggtaccatgttgacaacattcactgctcaggacccagatcgatatatgcagcaaaatattagatacactaaattatctgatcctgccaattggctaaaaatagatcctgtgaatggacaaataactacaattgctgttttggaccgagaatcaccaaatgtgaaaaacaatatatataatgctactttccttgcttctgacaatggaattcctcctatgagtggaacaggaacgctgcagatctatttacttgatattaatgacaatgcccctcaagtgttacctcaagaggcagagacttgcgaaactccagaccccaattcaattaatattacagcacttgattatgacattgatccaaatgctggaccatttgcttttgatcttcctttatctccagtgactattaagagaaattggaccatcactcggcttaatggtgattttgctcagcttaatttaaagataaaatttcttgaagctggtatctatgaagttcccatcataatcacagattcgggtaatcctcccaaatcaaatatttccatcctgcgcgtgaaggtttgccagtgtgactccaacggggactgcacagatgtggacaggattgtgggtgcggggcttggcaccggtgccatcattgccatcctgctctgcatcatcatcctgcttatccttgtgctgatgtttgtggtatggatgaaacgccgggataaagaacgccaggccaaacaacttttaattgatccagaagatgatgtaagagataatattttaaaatatgatgaagaaggtggaggagaagaagaccaggactatgacttgagccagctgcagcagcctgacactgtggagcctgatgccatcaagcctgtgggaatccgacgaatggatgaaagacccatccacgctgagccccagtatccggtccgatctgcagccccacaccctggagacattggggacttcattaatgagggccttaaagcggctgacaatgaccccacagctccaccatatgactccctgttagtgtttgactatgaaggcagtggctccactgctgggtccttgagctcccttaattcctcaagtagtggtggtgagcaggactatgattacctgaacgactgggggccacggttcaagaaacttgctgacatgtatggtggaggtgatgactgaacttcagggtgaacttggtttttggacaagtacaaacaatttcaactgatattcccaaaaagcattcagaagctaggctttaactttgtagtctactagcacagtgcttgctggaggctttggcataggctgcaaaccaatttgggctcagagggaatatcagtgatccatactgtttggaaaaacactgagctcagttacacttgaattttacagtacagaagcactgggattttatgtgcctttttgtacctttttcagattggaattagttttctgtttaaggctttaatggtactgatttctgaaacgataagtaaaagacaaaatattttgtggtgggagcagtaagttaaaccatgatatgcttcaacacgcttttgttacattgcatttgcttttattaaaatacaaaattaaacaaacaaaaaaactcatggagcgattttattatcttgggggatgagaccatgagattggaaaatgtacattacttctagttttagactttagtttgttttttttttttcactaaaatcttaaaacttactcagctggttgcaaataaagggagttttcatatcaccaatttgtagcaaaattgaattttttcataaactagaatgttagacacattttggtcttaatccatgtacacttttttatttctgtatttttccacttcactgtaaaaatagtatgtgtacataatgttttattggcatagtctatggagaagtgcagaaacttcagaacatgtgtatgtattatttggactatggattcaggttttttgcatgtttatatctttcgttatggataaagtatttacaaaacagtgacatttgattcaattgttgagctgtagttagaatactcaatttttaatttttttaatttttttattttttattttctttttggtttggggagggagaaaagttcttagcacaaatgttttacataatttgtaccaaaaaaaaaaaaaaggaaaggaaagaaaggggtggcctgacactggtggcactactaagtgtgtgttttttaaaaaaaaaaatggaaaaaaaaaagcttttaaactggagagacttctgacaacagctttgcctctgtattgtgtaccagaatataaatgatacacctctgaccccagcgttctgaataaaatgctaattttggaaaaaaaaaaaaaaaaa

SEQ ID NO: 428 - protein, 99 aa, Homo sapiens
MTSKLAVALLAAFLISAALCEGAVLPRSAKELRCQCIKTYSKPFHPKFIKELRVIESGPHCANTEIIVKLSDGRELCLDPKENWVQRVVEKFLKRAENS

SEQ ID NO: 429 - DNA, 1666 bp, Homo sapiens
ctccataaggcacaaactttcagagacagcagagcacacaagcttctaggacaagagccaggaagaaaccaccggaaggaaccatctcactgtgtgtaaacatgacttccaagctggccgtggctctcttggcagccttcctgatttctgcagctctgtgtgaaggtgcagttttgccaaggagtgctaaagaacttagatgtcagtgcataaagacatactccaaacctttccaccccaaatttatcaaagaactgagagtgattgagagtggaccacactgcgccaacacagaaattattgtaaagctttctgatggaagagagctctgtctggaccccaaggaaaactgggtgcagagggttgtggagaagtttttgaagagggctgagaattcataaaaaaattcattctctgtggtatccaagaatcagtgaagatgccagtgaaacttcaagcaaatctacttcaacacttcatgtattgtgtgggtctgttgtagggttgccagatgcaatacaagattcctggttaaatttgaatttcagtaaacaatgaatagtttttcattgtaccatgaaatatccagaacatacttatatgtaaagtattatttatttgaatctacaaaaaacaacaaataatttttaaatataaggattttcctagatattgcacgggagaatatacaaatagcaaaattgaggccaagggccaagagaatatccgaactttaatttcaggaattgaatgggtttgctagaatgtgatatttgaagcatcacataaaaatgatgggacaataaattttgccataaagtcaaatttagctggaaatcctggatttttttctgttaaatctggcaaccctagtctgctagccaggatccacaagtccttgttccactgtgccttggtttctcctttatttctaagtggaaaaagtattagccaccatcttacctcacagtgatgttgtgaggacatgtggaagcactttaagttttttcatcataacataaattattttcaagtgtaacttattaacctatttattatttatgtatttatttaagcatcaaatatttgtgcaagaatttggaaaaatagaagatgaatcattgattgaatagttataaagatgttatagtaaatttattttattttagatattaaatgatgttttattagataaatttcaatcagggtttttagattaaacaaacaaacaattgggtacccagttaaattttcatttcagataaacaacaaataattttttagtataagtacattattgtttatctgaaattttaattgaactaacaatcctagtttgatactcccagtcttgtcattgccagctgtgttggtagtgctgtgttgaattacggaataatgagttagaactattaaaacagccaaaactccacagtcaatattagtaatttcttgctggttgaaacttgtttattatgtacaaatagattcttataatattatttaaatgactgcatttttaaatacaaggctttatatttttaactttaagatgtttttatgtgctctccaaattttttttactgtttctgattgtatggaaatataaaagtaaatatgaaacatttaaaatataatttgttgtcaaagtaaaaaaaaaaaaaaa

SEQ ID NO: 430-431 - skipped (2 entries)

SEQ ID NO: 432 - protein, 885 aa, Homo sapiens
MAWRCPRMGRVPLAWCLALCGWACMAPRGTQAEESPFVGNPGNITGARGLTGTLRCQLQVQGEPPEVHWLRDGQILELADSTQTQVPLGEDEQDDWIVVSQLRITSLQLSDTGQYQCLVFLGHQTFVSQPGYVGLEGLPYFLEEPEDRTVAANTPFNLSCQAQGPPEPVDLLWLQDAVPLATAPGHGPQRSLHVPGLNKTSSFSCEAHNAKGVTTSRTATITVLPQQPRNLHLVSRQPTELEVAWTPGLSGIYPLTHCTLQAVLSDDGMGIQAGEPDPPEEPLTSQASVPPHQLRLGSLHPHTPYHIRVACTSSQGPSSWTHWLPVETPEGVPLGPPENISATRNGSQAFVHWQEPRAPLQGTLLGYRLAYQGQDTPEVLMDIGLRQEVTLELQGDGSVSNLTVCVAAYTAAGDGPWSLPVPLEAWRPVKEPSTPAFSWPWWYVLLGAVVAAACVLILALFLVHRRKKETRYGEVFEPTVERGELVVRYRVRKSYSRRTTEATLNSLGISEELKEKLRDVMVDRHKVALGKTLGEGEFGAVMEGQLNQDDSILKVAVKTMKIAICTRSELEDFLSEAVCMKEFDHPNVMRLIGVCFQGSERESFPAPVVILPFMKHGDLHSFLLYSRLGDQPVYLPTQMLVKFMADIASGMEYLSTKRFIHRDLAARNCMLNENMSVCVADFGLSKKIYNGDYYRQGRIAKMPVKWIAIESLADRVYTSKSDVWSFGVTMWEIATRGQTPYPGVENSEIYDYLRQGNRLKQPADCLDGLYALMSRCWELNPQDRPSFTELREDLENTLKALPPAQEPDEILYVNMDEGGGYPEPPGAAGGADPPTQPDPKDSCSCLTAAEVHPAGRYVLCPSTTPSPAQPADRGSPAAPGQEDGA

SEQ ID NO: 433 - DNA, 4987 bp, Homo sapiens
gagtggagttctggaggaatgtttaccagacacagagcccagagggacagcgcccagagcccagatagagagacacggcctcactggctcagcaccagggtccccttccccctcctcagctccctccctggcccctttaagaaagagctgatcctctcctctcttgagttaacccctgattgtccaggtggcccctggctctggcctggtgggcggaggcaaagggggagccaggggcggagaaagggttgcccaagtctgggagtgagggaaggaggcaggggtgctgagaaggcggctgctgggcagagccggtggcaagggcctcccctgccgctgtgccaggcaggcagtgccaaatccggggagcctggagctggggggagggccggggacagcccggccctgccccctcccccgctgggagcccagcaacttctgaggaaagtttggcacccatggcgtggcggtgccccaggatgggcagggtcccgctggcctggtgcttggcgctgtgcggctgggcgtgcatggcccccaggggcacgcaggctgaagaaagtcccttcgtgggcaacccagggaatatcacaggtgcccggggactcacgggcacccttcggtgtcagctccaggttcagggagagccccccgaggtacattggcttcgggatggacagatcctggagctcgcggacagcacccagacccaggtgcccctgggtgaggatgaacaggatgactggatagtggtcagccagctcagaatcacctccctgcagctttccgacacgggacagtaccagtgtttggtgtttctgggacatcagaccttcgtgtcccagcctggctatgttgggctggagggcttgccttacttcctggaggagcccgaagacaggactgtggccgccaacacccccttcaacctgagctgccaagctcagggacccccagagcccgtggacctactctggctccaggatgctgtccccctggccacggctccaggtcacggcccccagcgcagcctgcatgttccagggctgaacaagacatcctctttctcctgcgaagcccataacgccaagggggtcaccacatcccgcacagccaccatcacagtgctcccccagcagccccgtaacctccacctggtctcccgccaacccacggagctggaggtggcttggactccaggcctgagcggcatctaccccctgacccactgcaccctgcaggctgtgctgtcagacgatgggatgggcatccaggcgggagaaccagaccccccagaggagcccctcacctcgcaagcatccgtgcccccccatcagcttcggctaggcagcctccatcctcacaccccttatcacatccgcgtggcatgcaccagcagccagggcccctcatcctggacccactggcttcctgtggagacgccggagggagtgcccctgggcccccctgagaacattagtgctacgcggaatgggagccaggccttcgtgcattggcaagagccccgggcgcccctgcagggtaccctgttagggtaccggctggcgtatcaaggccaggacaccccagaggtgctaatggacatagggctaaggcaagaggtgaccctggagctgcagggggacgggtctgtgtccaatctgacagtgtgtgtggcagcctacactgctgctggggatggaccctggagcctcccagtacccctggaggcctggcgcccagtgaaggaaccttcaactcctgccttctcgtggccctggtggtatgtactgctaggagcagtcgtggccgctgcctgtgtcctcatcttggctctcttccttgtccaccggcgaaagaaggagacccgttatggagaagtgtttgaaccaacagtggaaagaggtgaactggtagtcaggtaccgcgtgcgcaagtcctacagtcgtcggaccactgaagctaccttgaacagcctgggcatcagtgaagagctgaaggagaagctgcgggatgtgatggtggaccggcacaaggtggccctggggaagactctgggagagggagagtttggagctgtgatggaaggccagctcaaccaggacgactccatcctcaaggtggctgtgaagacgatgaagattgccatctgcacgaggtcagagctggaggatttcctgagtgaagcggtctgcatgaaggaatttgaccatcccaacgtcatgaggctcatcggtgtctgtttccagggttctgaacgagagagcttcccagcacctgtggtcatcttacctttcatgaaacatggagacctacacagcttcctcctctattcccggctcggggaccagccagtgtacctgcccactcagatgctagtgaagttcatggcagacatcgccagtggcatggagtatctgagtaccaagagattcatacaccgggacctggcggccaggaactgcatgctgaatgagaacatgtccgtgtgtgtggcggacttcgggctctccaagaagatctacaatggggactactaccgccagggacgtatcgccaagatgccagtcaagtggattgccattgagagtctagctgaccgtgtctacaccagcaagagcgatgtgtggtccttcggggtgacaatgtgggagattgccacaagaggccaaaccccatatccgggcgtggagaacagcgagatttatgactatctgcgccagggaaatcgcctgaagcagcctgcggactgtctggatggactgtatgccttgatgtcgcggtgctgggagctaaatccccaggaccggccaagttttacagagctgcgggaagatttggagaacacactgaaggccttgcctcctgcccaggagcctgacgaaatcctctatgtcaacatggatgagggtggaggttatcctgaaccccctggagctgcaggaggagctgaccccccaacccagccagaccctaaggattcctgtagctgcctcactgcggctgaggtccatcctgctggacgctatgtcctctgcccttccacaacccctagccccgctcagcctgctgataggggctccccagcagccccagggcaggaggatggtgcctgagacaaccctccacctggtactccctctcaggatccaagctaagcactgccactggggaaaactccaccttcccactttcccaccccacgccttatccccacttgcagccctgtcttcctacctatcccacctccatcccagacaggtccctccccttctctgtgcagtagcatcaccttgaaagcagtagcatcaccatctgtaaaaggaaggggttggattgcaatatctgaagccctcccaggtgttaacattccaagactctagagtccaaggtttaaagagtctagattcaaaggttctaggtttcaaagatgctgtgagtctttggttctaaggacctgaaattccaaagtctctaattctattaaagtgctaaggttctaaggcctacttttttttttttttttttttttttttttttttttgcgatagagtctcactgtgtcacccaggctggagtgcagtggtgcaatctcgcctcactgcaaccttcacctaccgagttcaagtgattttcctgccttggcctcccaagtagctgggattacaggtgtgtgccaccacacccggctaatttttatatttttagtagagacagggtttcaccatgttggccaggctggtctaaaactcctgacctcaagtgatctgcccacctcagcctcccaaagtgctgagattacaggcatgagccactgcactcaaccttaagacctactgttctaaagctctgacattatgtggttttagattttctggttctaacatttttgataaagcctcaaggttttaggttctaaagttctaagattctgattttaggagctaaggctctatgagtctagatgtttattcttctagagttcagagtccttaaaatgtaagattatagattctaaagattctatagttctagacatggaggttctaaggcctaggattctaaaatgtgatgttctaaggctctgagagtctagattctctggctgtaaggctctagatcataaggcttcaaaatgttatcttctcaagttctaagattctaatgatgatcaattatagtttctgaggctttatgataatagattctcttgtataagatcctagatcctaagggtcgaaagctctagaatctgcaattcaaaagttccaagagtctaaagatggagtttctaaggtccggtgttctaagatgtgatattctaagacttactctaagatcttagattctctgtgtctaagattctagatcagatgctccaagattctagatgattaaataagattctaacggtctgttctgtttcaaggcactctagattccattggtccaagattccggatcctaagcatctaagttataagactctcacactcagttgtgactaactagacaccaaagttctaataatttctaatgttggacacctttaggttctttgctgcattctgcctctctaggaccatggttaagagtccaagaatccacatttctaaaatcttatagttctaggcactgtagttctaagactcaaatgttctaagtttctaagattctaaaggtccacaggtctagactattaggtgcaatttcaaggttctaaccctatactgtagtattctttggggtgcccctctccttcttagctatcattgcttcctcctccccaactgtgggggtgtgcccccttcaagcctgtgcaatgcattagggatgcctcctttcccgcaggggatggacgatctcccacctttcgggccatgttgcccccgtgagccaatccctcaccttctgagtacagagtgtggactctggtgcctccagaggggctcaggtcacataaaactttgtatatcaacgaaaaaaa

SEQ ID NO: 434 - protein, 742 aa, Homo sapiens [sequence omitted]

SEQ ID NO: 435 - DNA, 930 bp, Homo sapiens
attttttaaattattaggtgtgggcagaagaaaaagctagtgatcaacagtggcaatggagctgtggaggacagaaagccaagtggactcaacggagaggccagcaagtctcaggaaatggtgcatttggtgaacaaggagtcgtcagaaactccagaccagtttatgacagctgatgagacaaggaacctgcagaatgtggacatgaagattggggtgtaacacctacaccattatcttggaaagaaacaaccgttggaaacataaccattacagggagctgggacacttaacagatgcaatgtgctactgattgtttcattgcgaatcttttttagcataaaattttctactctttttgttttttgtgttttgttctttaaagtcaggtccaatttgtaaaaacagcattgctttctgaaattagggcccaattaataatcagcaagaatttgatcgttccagttcccacttggaggcctttcatccctcgggtgtgctatggatggcttctaacaaaaactacacatatgtattcctgatcgccaacctttcccccaccagctaaggacatttcccagggttaatagggcctggtccctgggaggaaatttgaatgggtccattttgcccttccatagcctaatccctgggcattgttttccactgaggttgggggttggggtgtactagttacatatcttcaacagaccccctctagaaatttttcagatgcttctgggagacacccaaagggtgaagctatttatctgtagtaaactatttatctgtgtttttgaaatattaaaccctggatcagtcctttgatcagtataattttttaaagttactttgtcagaggcacaaaagggtttaaactgattcataataaatatctgtacttcttcgatcttcaccttttgtgctgtg

SEQ ID NO: 436 - protein, 419 aa, Homo sapiens
MHLLGFFSVACSLLAAALLPGPREAPAAAAAFESGLDLSDAEPDAGEATAYASKDLEEQLRSVSSVDELMTVLYPEYWKMYKCQLRKGGWQHNREQANLNSRTEETIKFAAAHYNTEILKSIDNEWRKTQCMPREVCIDVGKEFGVATNTFFKPPCVSVYRCGGCCNSEGLQCMNTSTSYLSKTLFEITVPLSQGPKPVTISFANHTSCRCMSKLDVYRQVHSIIRRSLPATLPQCQAANKTCPTNYMWNNHICRCLAQEDFMFSSDAGDDSTDGFHDICGPNKELDEETCQCVCRAGLRPASCGPHKELDRNSCQCVCKNKLFPSQCGANREFDENTCQCVCKRTCPRNQPLNPGKCACECTESPQKCLLKGKKFHHQTCSCYRRPCTNRQKACEPGFSYSEEVCRCVPSYWKRPQMS

SEQ ID NO: 437 - DNA, 2076 bp, Homo sapiens
cggggaaggggagggaggagggggacgagggctctggcgggtttggaggggctgaacatcgcggggtgttctggtgtcccccgccccgcctctccaaaaagctacaccgacgcggaccgcggcggcgtcctccctcgccctcgcttcacctcgcgggctccgaatgcggggagctcggatgtccggtttcctgtgaggcttttacctgacacccgccgcctttccccggcactggctgggagggcgccctgcaaagttgggaacgcggagccccggacccgctcccgccgcctccggctcgcccagggggggtcgccgggaggagcccgggggagagggaccaggaggggcccgcggcctcgcaggggcgcccgcgcccccacccctgcccccgccagcggaccggtcccccacccccggtccttccaccatgcacttgctgggcttcttctctgtggcgtgttctctgctcgccgctgcgctgctcccgggtcctcgcgaggcgcccgccgccgccgccgccttcgagtccggactcgacctctcggacgcggagcccgacgcgggcgaggccacggcttatgcaagcaaagatctggaggagcagttacggtctgtgtccagtgtagatgaactcatgactgtactctacccagaatattggaaaatgtacaagtgtcagctaaggaaaggaggctggcaacataacagagaacaggccaacctcaactcaaggacagaagagactataaaatttgctgcagcacattataatacagagatcttgaaaagtattgataatgagtggagaaagactcaatgcatgccacgggaggtgtgtatagatgtggggaaggagtttggagtcgcgacaaacaccttctttaaacctccatgtgtgtccgtctacagatgtgggggttgctgcaatagtgaggggctgcagtgcatgaacaccagcacgagctacctcagcaagacgttatttgaaattacagtgcctctctctcaaggccccaaaccagtaacaatcagttttgccaatcacacttcctgccgatgcatgtctaaactggatgtttacagacaagttcattccattattagacgttccctgccagcaacactaccacagtgtcaggcagcgaacaagacctgccccaccaattacatgtggaataatcacatctgcagatgcctggctcaggaagattttatgttttcctcggatgctggagatgactcaacagatggattccatgacatctgtggaccaaacaaggagctggatgaagagacctgtcagtgtgtctgcagagcggggcttcggcctgccagctgtggaccccacaaagaactagacagaaactcatgccagtgtgtctgtaaaaacaaactcttccccagccaatgtggggccaaccgagaatttgatgaaaacacatgccagtgtgtatgtaaaagaacctgccccagaaatcaacccctaaatcctggaaaatgtgcctgtgaatgtacagaaagtccacagaaatgcttgttaaaaggaaagaagttccaccaccaaacatgcagctgttacagacggccatgtacgaaccgccagaaggcttgtgagccaggattttcatatagtgaagaagtgtgtcgttgtgtcccttcatattggaaaagaccacaaatgagctaagattgtactgttttccagttcatcgattttctattatggaaaactgtgttgccacagtagaactgtctgtgaacagagagacccttgtgggtccatgctaacaaagacaaaagtctgtctttcctgaaccatgtggataactttacagaaatggactggagctcatctgcaaaaggcctcttgtaaagactggttttctgccaatgaccaaacagccaagattttcctcttgtgatttctttaaaagaatgactatataatttatttccactaaaaatattgtttctgcattcatttttatagcaacaacaattggtaaaactcactgtgatcaatatttttatatcatgcaaaatatgtttaaaataaaatgaaaattgtattat

SEQ ID NO: 438 - protein, 717 aa, Homo sapiens
MVAERTHKAAATGARGPGELGAPGTVALVAARAERGARLPSPGSCGLLTLALCSLALSLLAHFRTAELQARVLRLEAERGEQQMETAILGRVNQLLDEKWKLHSRRRREAPKTSPGCNCPPAFQGPTGRPGLPGDKGAIGMPGRVGSPGDAGLSIIGPRGPPGQPGTRGFPGFPGPIGLDGKPGHPGPKGDMGLTGPPGQPGPQGQKGEKGQCGEYPHRECLSSMPAALRSSQIIALKLLPLLNSVRLAPPPVIKRRTFQGEQSQASIQGPPGPPGPPGPSGPLGHPGLPGPMGPPGLPGPPGPKGDPGIQGYHGRKGERGMPGMPGKHGAKGAPGIAVAGMKGEPGIPGTKGEKGAEGSPGLPGLLGQKGEKGDAGNSIGGGRGEPGPPGLPGPPGPKGEAGVDGQVGPPGQPGDKGERGAAGEQGPDGPKGSKGEPGKGEMVDYNGNINEALQEIRTLALMGPPGLPGQIGPPGAPGIPGQKGEIGLPGPPGHDGEKGPRGKPGDMGPPGPQGPPGKDGPPGVKGENGHPGSPGEKGEKGETGQAGSPGEKGEAGEKGNPGAEVPGLPGPEGPPGPPGLQGVPGPKGEAGLDGAKGEKGFQGEKGDRGPLGLPGASGLDGRPGPPGTPGPIGVPGPAGPKGERGSKGDPGMTGPTGAAGLPGLHGPPGDKGNRGERGKKGSRGPKGDKGDQGAPGLDAPCPLGEDGLPVQGCWNK

SEQ ID NO: 439 - DNA, 3136 bp, Homo sapiens
aagtagcacggattgctcatccgatccgtgccgccgcagggagtgtgtcaagttacagaggcgccggaatcggcccctgcgctcctcgccagccgccacgacccacctctgcccatggggccctccgtgtgcgccccttcgcccggggactgaaactgactggcccgggagacacgaggcgcccagaaggactgacagcgcggcaccaactgctctgcagacacttgaagggaaagactgggcggagagaaggagagccggtcagattcccctaactttcctggacttggaacgttcttcgaaataacttttttctcacctaggtgtaccccaattaccgctggttgtgctttttcggcacttcctctcctactgctaatttttccgtcctctttgccgggagcagcggaaagggacgttttccagcgatacaagccctttccccctgccccgcagtttggatagagccttttggcagcggctgtcgcctttatttattctatttatttatttattggttctcaagacgcgagaggatggtagcggagcgcacccacaaagcggcagccaccggtgcccgcggccctggggagttgggcgcgcccgggacggtggctctggtggcggcgcgggcggagcgcggcgcacggctgccgagtccagggtcgtgcgggctgctgacgctggccctctgctcgctggcactcagcctgctcgcccactttcggacggccgagctgcaggcccgggtgctgcgcctggaagcggagcgcggggagcagcaaatggagacggctattttgggacgagtcaatcaactgctggacgagaaatggaagctccactcaaggaggcgccgggaggccccaaagacatctccaggatgtaactgcccaccagcatttcagggtcccactggaagacccggactcccaggggacaaaggtgccattgggatgcctggacgtgtggggtcccccggagacgctgggctgtccatcattggtccccgcggcccccctggtcaaccaggaactagaggtttccctggatttccgggtcccattgggctggacggcaaaccgggccacccaggaccaaagggcgacatgggtctgacgggtcccccaggacagccgggaccccagggacaaaaaggagaaaagggtcagtgtggagagtacccacaccgggagtgcctaagcagcatgccagcagctctgcgctccagccaaataattgccctgaagctgctgcctctcctcaattcagtgcgactggctccacccccggtcataaaaaggcggacgttccagggcgaacagagccaggccagcatccaaggtccaccagggcccccaggcccccctggaccaagtggacctctggggcacccaggactgccagggcctatggggccacctggcttacctgggcctcctggaccaaagggagacccagggatccagggctaccacggccggaagggagaacggggcatgccagggatgccaggcaagcatggagccaagggggcgcccggaattgccgtggctgggatgaagggtgagccagggatcccaggaaccaagggtgagaagggggctgaaggctcccctgggcttcctggcctcctggggcagaagggagagaaaggcgatgctggcaactccattggaggaggcagaggggaacctggccctccagggctccctgggcccccagggccaaagggagaagcaggtgtcgatggccaggttggccccccagggcagccaggagacaagggggagcgtggagcagctggagaacagggaccagatggccccaagggctccaagggagaaccagggaaaggagagatggtggattacaatggaaacatcaatgaggctctccaggagatccggacgctggccttgatggggcctcctggtcttcctgggcaaattggcccacctggagctccagggattccaggccagaagggggagattggactgccaggccctccaggacacgatggggaaaagggacctcgcggtaaaccaggagacatgggccctcctggtccccaaggccccccaggaaaggatggacctccaggagtgaagggagaaaacgggcacccagggagcccaggagagaagggggaaaaaggggagacaggacaagcaggctcaccgggagagaaaggagaagccggggagaagggcaatccaggagcagaggttcctgggctgccagggccagaggggcctcccggacctccggggctccaaggtgttcctggaccaaagggggaagcaggactagatggagcaaaaggagagaaaggcttccagggagaaaaaggagaccgtggtcccctgggactacccggagcttcaggtttggacggcaggcctgggccaccgggtactccaggaccaattggagttccaggcccagcgggaccaaagggcgagaggggcagcaaaggagaccctgggatgacaggaccaacgggagcagctgggcttcctggtttacatggaccacccggggacaagggaaaccggggggagagggggaagaaaggctctagagggcctaaaggggataagggagaccaaggagcgcctggattagatgccccctgcccattgggcgaagatggcttaccagtccaaggctgctggaacaagtgatgcctctaaccttggattggcctgtgtgtgtgtttgtacatagaatatttatttttatacagttttcactttttgaaaatgccagaagtatgatgcatcttacagattattaaaaaagaaagaaaaacctgcatattttgtacagaaaatatcaacctcttcccttttgtttacaagatgttttgtataagcctatgtctctaatacattttttgtttggtcgtaatgtctgcatgatatttgtgcacatttattaagtatcgaagcttaataaattattgtgtcctggtgccaaagggggccagccagaactgaggtgctggctagctcatgtgtgaattcacataaatgtagaggtccatgatatttgctaagctaggtgtgtctaagagtattttaaacccttatggattttcattattaaaggaaatgaaacatggcaattc

SEQ ID NO: 440 - DNA, 347 bp, Homo sapiens
gactttctgaactatgactttctcttttttttttttttttttttttttttttttgatgagttatactcttgttgcacaggctggagtgcagtggtgcgatcttggatcactacagcttgaactcccaggttcaacctactctactacctcatcctccctagtagctgggattacaggcatgcaccaccatgcccagctaatctgatatttttagtagagacaggttgtgccacgttggtcaggctggtctcgaactcctgacctcaggtgatccgcccttctcggcctcccaaagtgctgggattacaggtgtgagccactgcacccggcttgaactatgactttca

SEQ ID NO: 441 - protein, 158 aa, Homo sapiens
MMQKLLKCSRLVLALALILVLESSVQGYPTQRARYQWVRCNPDSNSANCLEEKGPMFELLPGESNKIPRLRTDLFPKTRIQDLNRIFPLSEDYSGSGFGSGSGSGSGSGSGFLTEMEQDYQLVDESDAFHDNLRSLDRNLPSDSQDLGQHGLEEDFML

SEQ ID NO: 442 - DNA, 1182 bp, Homo sapiens
gaattccgctagactaagttggtcatgatgcagaagctactcaaatgcagtcggcttgtcctggctcttgccctcatcctggttctggaatcctcagttcaaggttatcctacgcagagagccaggtaccaatgggtgcgctgcaatccagacagtaattctgcaaactgccttgaagaaaaaggaccaatgttcgaactacttccaggtgaatccaacaagatcccccgtctgaggactgacctttttccaaagacgagaatccaggacttgaatcgtatcttcccactttctgaggactactctggatcaggcttcggctccggctccggctctggatcaggatctgggagtggcttcctaacggaaatggaacaggattaccaactagtagacgaaagtgatgctttccatgacaaccttaggtctcttgacaggaatctgccctcagacagccaggacttgggtcaacatggattagaagaggattttatgttataaaagaggattttcccaccttgacaccaggcaatgtagttagcatattttatgtaccatggttatatgattaatcttgggacaaagaattttatagaaatttttaaacatctgaaaaagaagcttaagttttatcatccttttttttctcatgaattcttaaaggattatgctttaatgctgttatctatcttattgttcttgaaaatacctgcattttttggtatcatgttcaaccaacatcattatgaaattaattagattcccatggccataaaatggctttaaagaatatatatatatttttaaagtagcttgagaagcaaattggcaggtaatatttcatacctaaattaagactctgacttggattgtgaattataatgatatgccccttttcttataaaaacaaaaaaaaaataatgaaacacagtgaatttgtagagtgggggtatttgacatattttacagggtggagtgtactatatactattacctttgaatgtgtttgcagagctagtggatgtgtttgtctacaagtatgattgctgttacataacaccccaaattaactcccaaattaaaacacagttgtgctgtcaatacctcatactgctttacctttttttcctggatatctgtgtattttcaaatgttactatatattaaagcagaaatataacc

SEQ ID NO: 443 - protein, 749 aa, Homo sapiens
MSFIDPYQHIIVEHQYSHKFTVVVLRATKVTKGAFGDMLDTPDPYVELFISTTPDSRKRTRHFNNDINPVWNETFEFILDPNQENVLEITLMDANYVMDETLGTATFTVSSMKVGEKKEVPFIFNQVTEMVLEMSLEVCSCPDLRFSMALCDQEKTFRQQRKEHIRESMKKLLGPKNSEGLHSARDVPVVAILGSGGGFRAMVGFSGVMKALYESGILDCATYVAGLSGSTWYMSTLYSHPDFPEKGPEEINEELMKNVSHNPLLLLTPQKVKRYVESLWKKKSSGQPVTFTDIFGMLIGETLIHNRMNTTLSSLKEKVNTAQCPLPLFTCLHVKPDVSELMFADWVEFSPYEIGMAKYGTFMAPDLFGSKFFMGTVVKKYEENPLHFLMGVWGSAFSILFNRVLGVSGSQSRGSTMEEELENITTKHIVSNDSSDSDDESHEPKGTENEDAGSDYQSDNQASWIHRMIMALVSDSALFNTREGRAGKVHNFMLGLNLNTSYPLSPLSDFATQDSFDDDELDAAVADPDEFERIYEPLDVKSKKIHVVDSGLTFNLPYPLILRPQRGVDLIISFDFSARPSDSSPPFKELLLAEKWAKMNKLPFPKIDPYVFDREGLKECYVFKPKNPDMEKDCPTIIHFVLANINFRKYKAPGVPRETEEEKEIADFDIFDDPESPFSTFNFQYPNQAFKRLHDLMHFNTLNNIDVIKEAMVESIEYRRQNPSRCSVSLSNVEARRFFNKEFLSKPKA

SEQ ID NO: 444 - DNA, 2846 bp, Homo sapiens
ctgaaaaaggatcctgactgaaagctagaggcattgaggagcctgaagattctcaggttttaaagacgctagagtgccaaagaagactttgaagtgtgaaaacatttcctgtaattgaaaccaaaatgtcatttatagatccttaccagcacattatagtggagcaccagtattcccacaagtttacggtagtggtgttacgtgccaccaaagtgacaaagggggcctttggtgacatgcttgatactccagatccctatgtggaactttttatctctacaacccctgacagcaggaagagaacaagacatttcaataatgacataaaccctgtgtggaatgagacctttgaatttattttggatcctaatcaggaaaatgttttggagattacgttaatggatgccaattatgtcatggatgaaactctagggacagcaacatttactgtatcttctatgaaggtgggagaaaagaaagaagttccttttattttcaaccaagtcactgaaatggttctagaaatgtctcttgaagtttgctcatgcccagacctacgatttagtatggctctgtgtgatcaggagaagactttcagacaacagagaaaagaacacataagggagagcatgaagaaactcttgggtccaaagaatagtgaaggattgcattctgcacgtgatgtgcctgtggtagccatattgggttcaggtgggggtttccgagccatggtgggattctctggtgtgatgaaggcattatacgaatcaggaattctggattgtgctacctacgttgctggtctttctggctccacctggtatatgtcaaccttgtattctcaccctgattttccagagaaagggccagaggagattaatgaagaactaatgaaaaatgttagccacaatccccttttacttctcacaccacagaaagttaaaagatatgttgagtctttatggaagaagaaaagctctggacaacctgtcacctttactgatatctttgggatgttaataggagaaacactaattcataatagaatgaatactactctgagcagtttgaaggaaaaagttaatactgcacaatgccctttacctcttttcacctgtcttcatgtcaaacctgacgtttcagagctgatgtttgcagattgggttgaatttagtccatacgaaattggcatggctaaatatggtacttttatggctcccgacttatttggaagcaaattttttatgggaacagtcgttaagaagtatgaagaaaaccccttgcatttcttaatgggtgtctggggcagtgccttttccatattgttcaacagagttttgggcgtttctggttcacaaagcagaggctccacaatggaggaagaattagaaaatattaccacaaagcatattgtgagtaatgatagctcggacagtgatgatgaatcacacgaacccaaaggcactgaaaatgaagatgctggaagtgactatcaaagtgataatcaagcaagttggattcatcgtatgataatggccttggtgagtgattcagctttattcaataccagagaaggacgtgctgggaaggtacacaacttcatgctgggcttgaatctcaatacatcttatccactgtctcctttgagtgactttgccacacaggactcctttgatgatgatgaactggatgcagctgtagcagatcctgatgaatttgagcgaatatatgagcctctggatgtcaaaagtaaaaagattcatgtagtggacagtgggctcacatttaacctgccgtatcccttgatactgagacctcagagaggggttgatctcataatctcctttgacttttctgcaaggccaagtgactctagtcctccgttcaaggaacttctacttgcagaaaagtgggctaaaatgaacaagctcccctttccaaagattgatccttatgtgtttgatcgggaagggctgaaggagtgctatgtctttaaacccaagaatcctgatatggagaaagattgcccaaccatcatccactttgttctggccaacatcaacttcagaaagtacaaggctccaggtgttccaagggaaactgaggaagagaaagaaatcgctgactttgatatttttgatgacccagaatcaccattttcaaccttcaattttcaatatccaaatcaagcattcaaaagactacatgatcttatgcacttcaatactctgaacaacattgatgtgataaaagaagccatggttgaaagcattgaatatagaagacagaatccatctcgttgctctgtttcccttagtaatgttgaggcaagaagatttttcaacaaggagtttctaagtaaacccaaagcatagttcatgtactggaaacggcagcagtttctgatgctgaggcagtttgcaatcccatgacaactggatttaaaagtacagtacagatagtcgtactgatcatgagagactggctgatactcaaagttgcagttacttagctgcatgagaataatactattataagttaggttgacaaatgatgttgattatgtaaggatatacttagctacattttcagtcagtatgaacttcctgatacaaatgtagggatatatactgtatttttaaacatttctcaccaactttcttatgtgtgttctttttaaaaattttttttcttttaaaatatttaacagttcaatctcaataagacctcgcattatgtatgaatgttattcactgactagatttattcataccatgagacaacactatttttatttatatatgcatatatatacatacatgaaataaatacatcaatataaaaat

SEQ ID NO: 445 - protein, 411 aa, Homo sapiens
MQCSWKAVLLLALASIAIQYTAIRTFTAKSFHTCPGLAEAGLAERLCEESPTFAYNLSRKTHILILATTRSGSSFVGQLFNQHLDVFYLFEPLYHVQNTLIPRFTQGKSPADRRVMLGASRDLLRSLYDCDLYFLENYIKPPPVNHTTDRIFRRGASRVLCSRPVCDPPGPADLVLEEGDCVRKCGLLNLTVAAEACRERSHVAIKTVRVPEVNDLRALVEDPRLNLKVIQLVRDPRGILASRSETFRDTYRLWRLWYGTGRKPYNLDVTQLTTVCEDFSNSVSTGLMRPPWLKGKYMLVRYEDLARNPMKKTEEIYGFLGIPLDSHVARWIQNNTRGDPTLGKHKYGTVRNSAATAEKWRFRLSYDIVAFAQNACQQVLAQLGYKIAASEEELKNPSVSLVEERDFRPFS

SEQ ID NO: 446 - DNA, 2415 bp, Homo sapiens
ggggagggcgcgggaggcggaggatgccgccgcggctgctgccgccgccgccacccgcgggtccccggcgaccctactccagacccgaggatggagccggcgctgggcgctgcagctgctcccggcgcgtccccgaccaggtagctggtgtcacttcggtgtggttggaagaagactttctccccagctgcattcccggaggcgccctttcgacctggaggccgggtctgctggccacagggctgccgcactggctgggactgccagctgggcctggagacgctggtggctgtggactccccagcttggagcagtccctctttgacctcaccccttggagaagcagccccatgaaggtgcccagccatgcaatgttcctggaaggccgtcctcctccttgccctggcctccattgccatccagtacacggccatccgcaccttcaccgccaagtcctttcacacctgccccgggctggcagaggccgggctggccgagcgactgtgcgaggagagccccaccttcgcctacaacctctcccgcaagacccacatcctcatcctggccaccacgcgcagcggctcctccttcgtgggccagctcttcaaccagcacctggacgtcttctacctgtttgagcccctctaccacgtccagaacacgctcatcccccgcttcacccagggcaagagcccggccgaccggcgggtcatgctaggcgccagccgcgacctcctgcggagcctctacgactgcgacctctacttcctggagaactacatcaagccgccgccggtcaaccacaccaccgacaggatcttccgccgcggggccagccgggtcctctgctcccggcctgtgtgcgaccctccggggccagccgacctggtcctggaggagggggactgtgtgcgcaagtgcgggctactcaacctgaccgtggcggccgaggcgtgccgcgagcgcagccacgtggccatcaagacggtgcgcgtgcccgaggtgaacgacctgcgcgccctggtggaagacccgcgattaaacctcaaggtcatccagctggtccgagacccccgcggcattctggcttcgcgcagcgagaccttccgcgacacgtaccggctctggcggctctggtacggcaccgggaggaaaccctacaacctggacgtgacgcagctgaccacggtgtgcgaggacttctccaactccgtgtccaccggcctcatgcggcccccgtggctcaagggcaagtacatgttggtgcgctacgaggacctggctcggaaccctatgaagaagaccgaggagatctacgggttcctgggcatcccgctggacagccacgtggcccgctggatccagaacaacacgcggggcgaccccaccctgggcaagcacaaatacggcaccgtgcgaaactcggcggccacggccgagaagtggcgcttccgcctctcctacgacatcgtggcctttgcccagaacgcctgccagcaggtgctggcccagctgggctacaagatcgccgcctcggaggaggagctgaagaacccctcggtcagcctggtggaggagcgggacttccgccccttctcgtgacccgggcggtgcgggtgggggcgggaggcgcaaggtgtcggttttgataaaatggaccgtttttaactgttgccttattaacccctccctctcccacctcatcttcgtgtccttcctgcccccagctcaccccactcccttctgccccttttttgtctctgaaatttgcactacgtcttggacgggaatcactggggcagagggcgcctgaagtagggtcccgccccccccaccccattcagacacatggatgttgggtctctgtgcggacggtgacaatgtttacaagcaccacatttacacatccacacacgcacacgggcactcgcgaggcgacttctcaagcttttgaatgggtgagtggtcgggtatctagtttttgcactgtcttactattcaaggtaagaggatacaaacaagaggaccacttgtctctaatttatgaatggtgtccatcctttccccatccctgcctcctgcccctgacgcccatttccccccttagagcagcgaaactgccccctcctgcccgcccttgcctgtcggtgaggcaggtttttactgtgaggtgaacgtggacctgtttctgtttccagtctgtggtgatgctgtctgtctgtctgagtctcgtggccgcccctggaccagtgatgactgatgaatcttatgagcttctgattgatctcggggtccatctgtgatatttctttgtgccaaaaagaaaaaaaaagagtggatcagtttgctaaatgaacattgaaattgaaatgctttatctgtgttttctgtaaataaaagagtgcaataatcacc

SEQ ID NO: 447 - protein, 284 aa, Homo sapiens
MDAIKKKMQMLKLDKENAIDRAEQAEADKKQAEDRCKQLEEEQQALQKKLKGTEDEVEKYSESVKEAQEKLEQAEKKATDAEADVASLNRRIQLVEEELDRAQERLATALQKLEEAEKAADESERGMKVIENRAMKDEEKMELQEMQLKEAKHIAEDSDRKYEEVARKLVILEGELERSEERAEVAESRARQLEEELRTMDQALKSLMASEEEYSTKEDKYEEEIKLLEEKLKEAETRAEFAERSVAKLEKTIDDLEETLASAKEENVEIHQTLDQTLLELNNL

SEQ ID NO: 448 - DNA, 1044 bp, Homo sapiens
tgctgctctcctcccgctccgtcctcctcgcctgccaccggtgcacccagtccgctcacccagcccagtccgtccggtcctcaccgcctgccggccggcccaccccccaccgcaggccatggacgccatcaagaagaagatgcagatgctgaagctggacaaggagaacgccatcgaccgcgccgagcaggccgaagccgacaagaagcaagctgaggaccgctgcaagcagctggaggaggagcagcaggccctccagaagaagctgaaggggacagaggatgaggtggaaaagtattctgaatccgtgaaggaggcccaggagaaactggagcaggccgagaagaaggccactgatgctgaggcagatgtggcctccctgaaccgccgcattcagctggttgaggaggagctggaccgggcccaggagcgcctggctacagccctgcagaagctggaggaggccgagaaggcggctgatgagagcgagagaggaatgaaggtcatcgaaaaccgggccatgaaggatgaggagaagatggaactgcaggagatgcagctgaaggaggccaagcacatcgctgaggattcagaccgcaaatatgaagaggtggccaggaagctggtgatcctggaaggagagctggagcgctcggaggagagggctgaggtggccgagagccgagccagacagctggaggaggaacttcgaaccatggaccaggccctcaagtccctgatggcctcagaggaggagtattccaccaaagaagataaatatgaagaggagatcaaactgttggaggagaagctgaaggaggctgagacccgagcagagtttgccgagaggtctgtggcaaagttggagaaaaccatcgatgacctagaagagaccttggccagtgccaaggaggagaacgtcgagattcaccagaccttggaccagaccctgctggaactcaacaacctgtgagggccagccccacccccagccaggctatggttgccaccccaacccaataaaactgatgttactagcctctc

SEQ ID NO: 449 - protein, 3396 aa, Homo sapiens
MFINIKSILWMCSTLIVTHALHKVKVGKSPPVRGSLSGKVSLPCHFSTMPTLPPSYNTSEFLRIKWSKIEVDKNGKDLKETTVLVAQNGNIKIGQDYKGRVSVPTHPEAVGDASLTVVKLLASDAGLYRCDVMYGIEDTQDTVSLTVDGVVFHYRAATSRYTLNFEAAQKACLDVGAVIATPEQLFAAYEDGFEQCDAGWLADQTVRYPIRAPRVGCYGDKMGKAGVRTYGFRSPQETYDVYCYVDHLDGDVFHLTVPSKFTFEEAAKECENQDARLATVGELQAAWRNGFDQCDYGWLSDASVRHPVTVARAQCGGGLLGVRTLYRFENQTGFPPPDSRFDAYCFKPKEATTIDLSILAETASPSLSKEPQMVSDRTTPIIPLVDELPVIPTEFPPVGNIVSFEQKATVQPQAITDSLATKLPTPTGSTKKPWDMDDYSPSASGPLGKLDISEIKEEVLQSTTGVSHYATDSWDGVVEDKQTQESVTQIEQIEVGPLVTSMEILKHIPSKEFPVTETPLVTARMILESKTEKKMVSTVSELVTTGHYGFTLGEEDDEDRTLTVGSDESTLIFDQIPEVITVSKTSEDTIHTHLEDLESVSASTTVSPLIMPDNNGSSMDDWEERQTSGRITEEFLGKYLSTTPFPSQHRTEIELFPYSGDKILVEGISTVIYPSLQTEMTHRRERTETLIPEMRTDTYTDEIQEEITKSPFMGKTEEEVFSGMKLSTSLSEPIHVTESSVEMTKSFDFPTLITKLSAEPTEVRDMEEDFTATPGTTKYDENITTVLLAHGTLSVEAATVSKWSWDEDNTTSKPLESTEPSASSKLPPALLTTVGMNGKDKDIPSFTEDGADEFTLIPDSTQKQLEEVTDEDIAAHGKFTIRFQPTTSTGIAEKSTLRDSTTEEKVPPITSTEGQVYATMEGSALGEVEDVDLSKPVSTVPQFAHTSEVEGLAFVSYSSTQEPTTYVDSSHTIPLSVIPKTDWGVLVPSVPSEDEVLGEPSQDILVIDQTRLEATISPETMRTTKITEGTTQEEFPWKEQTAEKPVPALSSTAWTPKEAVTPLDEQEGDGSAYTVSEDELLTGSERVPVLETTPVGKIDHSVSYPPGAVTEHKVKTDEVVTLTPRIGPKVSLSPGPEQKYETEGSSTTGFTSSLSPFSTHITQLMEETTTEKTSLEDIDLGSGLFEKPKATELIEFSTIKVTVPSDITTAFSSVDRLHTTSAFKPSSAITKKPPLIDREPGEETTSDMVIIGESTSHVPPTTLEDIVAKETETDIDREYFTTSSPPATQPTRPPTVEDKEAFGPQALSTPQPPASTKFHPDINVYIIEVRENKTGRMSDLSVIGHPIDSESKEDEPCSEETDPVHDLMAEILPEFPDIIEIDLYHSEENEEEEEECANATDVTTTPSVQYINGKHLVTTVPKDPEAAEARRGQFESVAPSQNFSDSSESDTHPFVIAKTELSTAVQPNESTETTESLEVTWKPETYPETSEHFSGGEPDVFPTVPFHEEFESGTAKKGAESVTERDTEVGHQAHEHTEPVSLFPEESSGEIAIDQESQKIAFARATEVTFGEEVEKSTSVTYTPTIVPSSASAYVSEEEAVTLIGNPWPDDLLSTKESWVEATPRQVVELSGSSSIPITEGSGEAEEDEDTMFTMVTDLSQRNTTDTLITLDTSRIITESFFEVPATTIYPVSEQPSAKVVPTKFVSETDTSEWISSTTVEEKKRKEEEGTTGTASTFEVYSSTQRSDQLILPFELESPNVATSSDSGTRKSFMSLTTPTQSEREMTDSTPVFTETNTLENLGAQTTEHSSIHQPGVQEGLTTLPRSPASVFMEQGSGEAAADPETTTVSSFSLNVEYAIQAEKEVAGTLSPHVETTFSTEPTGLVLSTVMDRVVAENITQTSREIVISERLGEPNYGAEIRGFSTGFPLEEDFSGDFREYSTVSHPIAKEETVMMEGSGDAAFRDTQTSPSTVPTSVHISHISDSEGPSSTMVSTSAFPWEEFTSSAEGSGEQLVTVSSSVVPVLPSAVQKFSGTASSIIDEGLGEVGTVNEIDRRSTILPTAEVEGTKAPVEKEEVKVSGTVSTNFPQTIEPAKLWSRQEVNPVRQEIESETTSEEQIQEEKSFESPQNSPATEQTIFDSQTFTETELKTTDYSVLTTKKTYSDDKEMKEEDTSLVNMSTPDPDANGLESYTTLPEATEKSHFFLATALVTESIPAEHVVTDSPIKKEESTKHFPKGMRPTIQESDTELLFSGLGSGEEVLPTLPTESVNFTEVEQINNTLYPHTSQVESTSSDKIEDFNRMENVAKEVGPLVSQTDIFEGSGSVTSTTLIEILSDTGAEGPTVAPLPFSTDIGHPQNQTVRWAEEIQTSRPQTITEQDSNKNSSTAEINETTTSSTDFLARAYGFEMAKEFVTSAPKPSDLYYEPSGEGSGEVDIVDSFHTSATTQATRQESSTTFVSDGSLEKHPEVPSAKAVTADGFPTVSVMLPLHSEQNKSSPDPTSTLSNTVSYERSTDGSFQDRFREFEDSTLKPNRKKPTENIIIDLDKEDKDLILTITESTILEILPELTSDKNTIIDIDHTKPVYEDILGMQTDIDTEVPSEPHDSNDESNDDSTQVQEIYEAAVNLSLTEETFEGSADVLASYTQATHDESMTYEDRSQLDHMGFHFTTGIPAPSTETELDVLLPTATSLPIPRKSATVIPEIEGIKAEAKALDDMFESSTLSDGQAIADQSEIIPTLGQFERTQEEYEDKKHAGPSFQPEFSSGAEEALVDHTPYLSIATTHLMDQSVTEVPDVMEGSNPPYYTDTTLAVSTFAKLSSQTPSSPLTIYSGSEASGHTEIPQPSALPGIDVGSSVMSPQDSFKEIHVNIEATFKPSSEEYLHITEPPSLSPDTKLEPSEDDGKPELLEEMEASPTELIAVEGTEILQDFQNKTDGQVSGEAIKMFPTIKTPEAGTVITTADEIELEGATQWPHSTSASATYGVEAGVVPWLSPQTSERPTLSSSPEINPETQAALIRGQDSTIAASEQQVAARILDSNDQATVNPVEFNTEVATPPFSLLETSNETDFLIGINEESVEGTAIYLPGPDRCKMNPCLNGGTCYPTETSYVCTCVPGYSGDQCELDFDECHSNPCRNGATCVDGFNTFRCLCLPSYVGALCEQDTETCDYGWHKFQGQCYKYFAHRRTWDAAERECRLQGAHLTSILSHEEQMFVNRVGHDYQWIGLNDKMFEHDFRWTDGSTLQYENWRPNQPDSFFSAGEDCVVIIWHENGQWNDVPCNYHLTYTCKKGTVACGQPPVVENAKTFGKMKPRYEINSLIRYHCKDGFIQRHLPTIRCLGNGRWAIPKITCMNPSAYQRTYSMKYFKNSSSAKDNSINTSKHDHRWSRRWQESRR

SEQ ID NO: 450 - DNA, 11185 bp, Homo sapiens
gctgccccgagcctttctggggaagaactccaggcgtgcggacgcaacagccgagaacattaggtgttgtggacaggagctgggaccaagatcttcggccagccccgcatcctcccgcatcttccagcaccgtcccgcaccctccgcatccttccccgggccaccacgcttcctatgtgacccgcctgggcaacgccgaacccagtcgcgcagcgctgcagtgaattttccccccaaactgcaataagccgccttccaaggccaagatgttcataaatataaagagcatcttatggatgtgttcaaccttaatagtaacccatgcgctacataaagtcaaagtgggaaaaagcccaccggtgaggggctccctctctggaaaagtcagcctaccttgtcatttttcaacgatgcctactttgccacccagttacaacaccagtgaatttctccgcatcaaatggtctaagattgaagtggacaaaaatggaaaagatttgaaagagactactgtccttgtggcccaaaatggaaatatcaagattggtcaggactacaaagggagagtgtctgtgcccacacatcccgaggctgtgggcgatgcctccctcactgtggtcaagctgctggcaagtgatgcgggtctttaccgctgtgacgtcatgtacgggattgaagacacacaagacacggtgtcactgactgtggatggggttgtgtttcactacagggcggcaaccagcaggtacacactgaattttgaggctgctcagaaggcttgtttggacgttggggcagtcatagcaactccagagcagctctttgctgcctatgaagatggatttgagcagtgtgacgcaggctggctggctgatcagactgtcagatatcccatccgggctcccagagtaggctgttatggagataagatgggaaaggcaggagtcaggacttatggattccgttctccccaggaaacttacgatgtgtattgttatgtggatcatctggatggtgatgtgttccacctcactgtccccagtaaattcaccttcgaggaggctgcaaaagagtgtgaaaaccaggatgccaggctggcaacagtgggggaactccaggcggcatggaggaacggctttgaccagtgcgattacgggtggctgtcggatgccagcgtgcgccaccctgtgactgtggccagggcccagtgtggaggtggtctacttggggtgagaaccctgtatcgttttgagaaccagacaggcttccctccccctgatagcagatttgatgcctactgctttaaacctaaagaggctacaaccatcgatttgagtatcctcgcagaaactgcatcacccagtttatccaaagaaccacaaatggtttctgatagaactacaccaatcatccctttagttgatgaattacctgtcattccaacagagttccctcccgtgggaaatattgtcagttttgaacagaaagccacagtccaacctcaggctatcacagatagtttagccaccaaattacccacacctactggcagtaccaagaagccctgggatatggatgactactcaccttctgcttcaggacctcttggaaagctagacatatcagaaattaaggaagaagtgctccagagtacaactggcgtctctcattatgctacggattcatgggatggtgtcgtggaagataaacaaacacaagaatcggttacacagattgaacaaatagaagtgggtcctttggtaacatctatggaaatcttaaagcacattccttccaaggaattccctgtaactgaaacaccattggtaactgcaagaatgatcctggaatccaaaactgaaaagaaaatggtaagcactgtttctgaattggtaaccacaggtcactatggattcaccttgggagaagaggatgatgaagacagaacacttacagttggatctgatgagagcaccttgatctttgaccaaattcctgaagtcattacggtgtcaaagacttcagaagacaccatccacactcatttagaagacttggagtcagtctcagcatccacaactgtttcccctttaattatgcctgataataatggatcatccatggatgactgggaagagagacaaactagtggtaggataacggaagagtttcttggcaaatatctgtctactacaccttttccatcacagcatcgtacagaaatagaattgtttccttattctggtgataaaatattagtagagggaatttccacagttatttatccttctctacaaacagaaatgacacatagaagagaaagaacagaaacactaataccagagatgagaacagatacttatacagatgaaatacaagaagagatcactaaaagtccatttatgggaaaaacagaagaagaagtcttctctgggatgaaactctctacatctctctcagagccaattcatgttacagagtcttctgtggaaatgaccaagtcttttgatttcccaacattgataacaaagttaagtgcagagccaacagaagtaagagatatggaggaagactttacagcaactccaggtactacaaaatatgatgaaaatattacaacagtgcttttggcccatggtactttaagtgttgaagcagccactgtatcaaaatggtcatgggatgaagataatacaacatccaagcctttagagtctacagaaccttcagcctcttcaaaattgccccctgccttactcacaactgtggggatgaatggaaaggataaagacatcccaagtttcactgaagatggagcagatgaatttactcttattccagatagtactcaaaagcagttagaggaggttactgatgaagacatagcagcccatggaaaattcacaattagatttcagccaactacatcaactggtattgcagaaaagtcaactttgagagattctacaactgaagaaaaagttccacctatcacaagcactgaaggccaagtttatgcaaccatggaaggaagtgctttgggtgaagtagaagatgtggacctctctaagccagtatctactgttccccaatttgcacacacttcagaggtggaaggattagcatttgttagttatagtagcacccaagagcctactacttatgtagactcttcccataccattcctctttctgtaattcccaagacagactggggagtgttagtaccttctgttccatcagaagatgaagttctaggtgaaccctctcaagacatacttgtcattgatcagactcgccttgaagcgactatttctccagaaactatgagaacaacaaaaatcacagagggaacaactcaggaagaattcccttggaaagaacagactgcagagaaaccagttcctgctctcagttctacagcttggactcccaaggaggcagtaacaccactggatgaacaagagggcgatggatcagcatatacagtctctgaagatgaattgttgacaggttctgagagggtcccagttttagaaacaactccagttggaaaaattgatcacagtgtgtcttatccaccaggtgctgtaactgagcacaaagtgaaaacagatgaagtggtaacactaacaccacgcattgggccaaaagtatctttaagtccagggcctgaacaaaaatatgaaacagaaggtagtagtacaacaggatttacatcatctttgagtccttttagtacccacattacccagcttatggaagaaaccactactgagaaaacatccctagaggatattgatttaggctcaggattatttgaaaagcccaaagccacagaactcatagaattttcaacaatcaaagtcacagttccaagtgatattaccactgccttcagttcagtagacagacttcacacaacttcagcattcaagccatcttccgcgatcactaagaaaccacctctcatcgacagggaacctggtgaagaaacaaccagtgacatggtaatcattggagaatcaacatctcatgttcctcccactacccttgaagatattgtagccaaggaaacagaaaccgatattgatagagagtatttcacgacttcaagtcctcctgctacacagccaacaagaccacccactgtggaagacaaagaggcctttggacctcaggcgctttctacgccacagcccccagcaagcacaaaatttcaccctgacattaatgtttatattattgaggtcagagaaaataagacaggtcgaatgagtgatttgagtgtaattggtcatccaatagattcagaatctaaagaagatgaaccttgtagtgaagaaacagatccagtgcatgatctaatggctgaaattttacctgaattccctgacataattgaaatagacctataccacagtgaagaaaatgaagaagaagaagaagagtgtgcaaatgctactgatgtgacaaccaccccatctgtgcagtacataaatgggaagcatctcgttaccactgtgcccaaggacccagaagctgcagaagctaggcgtggccagtttgaaagtgttgcaccttctcagaatttctcggacagctctgaaagtgatactcatccatttgtaatagccaaaacggaattgtctactgctgtgcaacctaatgaatctacagaaacaactgagtctcttgaagttacatggaagcctgagacttaccctgaaacatcagaacatttttcaggtggtgagcctgatgttttccccacagtcccattccatgaggaatttgaaagtggaacagccaaaaaaggggcagaatcagtcacagagagagatactgaagttggtcatcaggcacatgaacatactgaacctgtatctctgtttcctgaagagtcttcaggagagattgccattgaccaagaatctcagaaaatagcctttgcaagggctacagaagtaacatttggtgaagaggtagaaaaaagtacttctgtcacatacactcccactatagttccaagttctgcatcagcatatgtttcagaggaagaagcagttaccctaataggaaatccttggccagatgacctgttgtctaccaaagaaagctgggtagaagcaactcctagacaagttgtagagctctcagggagttcttcgattccaattacagaaggctctggagaagcagaagaagatgaagatacaatgttcaccatggtaactgatttatcacagagaaatactactgatacactcattactttagacactagcaggataatcacagaaagcttttttgaggttcctgcaaccaccatttatccagtttctgaacaaccttctgcaaaagtggtgcctaccaagtttgtaagtgaaacagacacttctgagtggatttccagtaccactgttgaggaaaagaaaaggaaggaggaggagggaactacaggtacggcttctacatttgaggtatattcatctacacagagatcggatcaattaattttaccctttgaattagaaagtccaaatgtagctacatctagtgattcaggtaccaggaaaagttttatgtccttgacaacaccaacacagtctgaaagggaaatgacagattctactcctgtctttacagaaacaaatacattagaaaatttgggggcacagaccactgagcacagcagtatccatcaacctggggttcaggaagggctgaccactctcccacgtagtcctgcctctgtctttatggagcagggctctggagaagctgctgccgacccagaaaccaccactgtttcttcattttcattaaacgtagagtatgcaattcaagccgaaaaggaagtagctggcactttgtctccgcatgtggaaactacattctccactgagccaacaggactggttttgagtacagtaatggacagagtagttgctgaaaatataacccaaacatccagggaaatagtgatttcagagcgattaggagaaccaaattatggggcagaaataaggggcttttccacaggttttcctttggaggaagatttcagtggtgactttagagaatactcaacagtgtctcatcccatagcaaaagaagaaacggtaatgatggaaggctctggagatgcagcatttagggacacccagacttcaccatctacagtacctacttcagttcacatcagtcacatatctgactcagaaggacccagtagcaccatggtcagcacttcagccttcccctgggaagagtttacatcctcagctgagggctcaggtgagcaactggtcacagtcagcagctctgttgttccagtgcttcccagtgctgtgcaaaagttttctggtacagcttcctccattatcgacgaaggattgggagaagtgggtactgtcaatgaaattgatagaagatccaccattttaccaacagcagaagtggaaggtacgaaagctccagtagagaaggaggaagtaaaggtcagtggcacagtttcaacaaactttccccaaactatagagccagccaaattatggtctaggcaagaagtcaaccctgtaagacaagaaattgaaagtgaaacaacatcagaggaacaaattcaagaagaaaagtcatttgaatcccctcaaaactctcctgcaacagaacaaacaatctttgattcacagacatttactgaaactgaactcaaaaccacagattattctgtactaacaacaaagaaaacttacagtgatgataaagaaatgaaggaggaagacacttctttagttaacatgtctactccagatccagatgcaaatggcttggaatcttacacaactctccctgaagctactgaaaagtcacattttttcttagctactgcattagtaactgaatctataccagctgaacatgtagtcacagattcaccaatcaaaaaggaagaaagtacaaaacattttccgaaaggcatgagaccaacaattcaagagtcagatactgagctcttattctctggactgggatcaggagaagaagttttacctactctaccaacagagtcagtgaattttactgaagtggaacaaatcaataacacattatatccccacacttctcaagtggaaagtacctcaagtgacaaaattgaagactttaacagaatggaaaatgtggcaaaagaagttggaccactcgtatctcaaacagacatctttgaaggtagtgggtcagtaaccagcacaacattaatagaaattttaagtgacactggagcagaaggacccacggtggcacctctccctttctccacggacatcggacatcctcaaaatcagactgtcaggtgggcagaagaaatccagactagtagaccacaaaccataactgaacaagactctaacaagaattcttcaacagcagaaattaacgaaacaacaacctcatctactgattttctggctagagcttatggttttgaaatggccaaagaatttgttacatcagcaccaaaaccatctgacttgtattatgaaccttctggagaaggatctggagaagtggatattgttgattcatttcacacttctgcaactactcaggcaaccagacaagaaagcagcaccacatttgtttctgatgggtccctggaaaaacatcctgaggtgccaagcgctaaagctgttactgctgatggattcccaacagtttcagtgatgctgcctcttcattcagagcagaacaaaagctcccctgatccaactagcacactgtcaaatacagtgtcatatgagaggtccacagacggtagtttccaagaccgtttcagggaattcgaggattccaccttaaaacctaacagaaaaaaacccactgaaaatattatcatagacctggacaaagaggacaaggatttaatattgacaattacagagagtaccatccttgaaattctacctgagctgacatcggataaaaatactatcatagatattgatcatactaaacctgtgtatgaagacattcttggaatgcaaacagatatagatacagaggtaccatcagaaccacatgacagtaatgatgaaagtaatgatgacagcactcaagttcaagagatctatgaggcagctgtcaacctttctttaactgaggaaacatttgagggctctgctgatgttctggctagctacactcaggcaacacatgatgaatcaatgacttatgaagatagaagccaactagatcacatgggctttcacttcacaactgggatccctgctcctagcacagaaacagaattagacgttttacttcccacggcaacatccctgccaattcctcgtaagtctgccacagttattccagagattgaaggaataaaagctgaagcaaaagccctggatgacatgtttgaatcaagcactttgtctgatggtcaagctattgcagaccaaagtgaaataataccaacattgggccaatttgaaaggactcaggaggagtatgaagacaaaaaacatgctggtccttcttttcagccagaattctcttcaggagctgaggaggcattagtagaccatactccctatctaagtattgctactacccaccttatggatcagagtgtaacagaggtgcctgatgtgatggaaggatccaatcccccatattacactgatacaacattagcagtttcaacatttgcgaagttgtcttctcagacaccatcatctcccctcactatctactcaggcagtgaagcctctggacacacagagatcccccagcccagtgctctgccaggaatagacgtcggctcatctgtaatgtccccacaggattcttttaaggaaattcatgtaaatattgaagcaactttcaaaccatcaagtgaggaataccttcacataactgagcctccctctttatctcctgacacaaaattagaaccttcagaagatgatggtaaacctgagttattagaagaaatggaagcttctcccacagaacttattgctgtggaaggaactgagattctccaagatttccaaaacaaaaccgatggtcaagtttctggagaagcaatcaagatgtttcccaccattaaaacacctgaggctggaactgttattacaactgccgatgaaattgaattagaaggtgctacacagtggccacactctacttctgcttctgccacctatggggtcgaggcaggtgtggtgccttggctaagtccacagacttctgagaggcccacgctttcttcttctccagaaataaaccctgaaactcaagcagctttaatcagagggcaggattccacgatagcagcatcagaacagcaagtggcagcgagaattcttgattccaatgatcaggcaacagtaaaccctgtggaatttaatactgaggttgcaacaccaccattttcccttctggagacttctaatgaaacagatttcctgattggcattaatgaagagtcagtggaaggcacggcaatctatttaccaggacctgatcgctgcaaaatgaacccgtgccttaacggaggcacctgttatcctactgaaacttcctacgtatgcacctgtgtgccaggatacagcggagaccagtgtgaacttgattttgatgaatgtcactctaatccctgtcgtaatggagccacttgtgttgatggttttaacacattcaggtgcctctgccttccaagttatgttggtgcactttgtgagcaagataccgagacatgtgactatggctggcacaaattccaagggcagtgctacaaatactttgcccatcgacgcacatgggatgcagctgaacgggaatgccgtctgcagggtgcccatctcacaagcatcctgtctcacgaagaacaaatgtttgttaatcgtgtgggccatgattatcagtggataggcctcaatgacaagatgtttgagcatgacttccgttggactgatggcagcacactgcaatacgagaattggagacccaaccagccagacagcttcttttctgctggagaagactgtgttgtaatcatttggcatgagaatggccagtggaatgatgttccctgcaattaccatctcacctatacgtgcaagaaaggaacagttgcttgcggccagccccctgttgtagaaaatgccaagacctttggaaagatgaaacctcgttatgaaatcaactccctgattagataccactgcaaagatggtttcattcaacgtcaccttccaactatccggtgcttaggaaatggaagatgggctatacctaaaattacctgcatgaacccatctgcataccaaaggacttattctatgaaatactttaaaaattcctcatcagcaaaggacaattcaataaatacatccaaacatgatcatcgttggagccggaggtggcaggagtcgaggcgctgatccctaaaatggcgaacatgtgttttcatcatttcagccaaagtcctaacttcctgtgcctttcctatcacctcgagaagtaattatcagttggtttggatttttggaccaccgttcagtcattttgggttgccgtgctcccaaaacattttaaatgaaagtattggcattcaaaaagacagcagacaaaatgaaagaaaatgagagcagaaagtaagcatttccagcctatctaatttctttagttttctatttgcctccagtgcagtccatttcctaatgtataccagcctactgtactatttaaaatgctcaatttcagcaccgatggccatgtaaataagatgatttaatgttgattttaatcctgtatataaaataaaaagtcacaatgagtttgggcatatttaatgatgattatggagccttagaggtctttaatcattggttcggctgcttttatgtagtttaggctggaaatggtttcacttgctctttgactgtcagcaagactgaagatggcttttcctggacagctagaaaacacaaaatcttgtaggtcattgcacctatctcagccataggtgcagtttgcttctacatgatgctaaaggctgcgaatgggatcctgatggaactaaggactccaatgtcgaactcttctttgctgcattcctttttcttcacttacaagaaaggcctgaatggaggacttttctgtaaccagg

SEQ ID NO: 451 - protein, 1821 aa, Homo sapiens
MRPRTKARSPGRALRNPWRGFLPLTLALFVGAGHAQRDPVGRYEPAGGDANRLRRPGGSYPAAAAAKVYSLFREQDAPVAGLQPVERAQPGWGSPRRPTEAEARRPSRAQQSRRVQPPAQTRRSTPLGQQQPAPRTRAAPALPRLGTPQRSGAAPPTPPRGRLTGRNVCGGQCCPGWTTANSTNHCIKPVCEPPCQNRGSCSRPQLCVCRSGFRGARCEEVIPDEEFDPQNSRLAPRRWAERSPNLRRSSAAGEGTLARAQPPAPQSPPAPQSPPAGTLSGLSQTHPSQQHVGLSRTVRLHPTATASSQLSSNALPPGPGLEQRDGTQQAVPLEHPSSPWGLNLTEKIKKIKIVFTPTICKQTCARGHCANSCERGDTTTLYSQGGHGHDPKSGFRIYFCQIPCLNGGRCIGRDECWCPANSTGKFCHLPIPQPDREPPGRGSRPRALLEAPLKQSTFTLPLSNQLASVNPSLVKVHIHHPPEASVQIHQVAQVRGGVEEALVENSVETRPPPWLPASPGHSLWDSNNIPARSGEPPRPLPPAAPRPRGLLGRCYLNTVNGQCANPLLELTTQEDCCGSVGAFWGVTLCAPCPPRPASPVIENGQLECPQGYKRLNLTHCQDINECLTLGLCKDAECVNTRGSYLCTCRPGLMLDPSRSRCVSDKAISMLQGLCYRSLGPGTCTLPLAQRITKQICCCSRVGKAWGSECEKCPLPGTEAFREICPAGHGYTYASSDIRLSMRKAEEEELARPPREQGQRSSGALPGPAERQPLRVVTDTWLEAGTIPDKGDSQAGQVTTSVTHAPAWVTGNATTPPMPEQGIAEIQEEQVTPSTDVLVTLSTPGIDRCAAGATNVCGPGTCVNLPDGYRCVCSPGYQLHPSQAYCTDDNECLRDPCKGKGRCINRVGSYSCFCYPGYTLATSGATQECQDINECEQPGVCSGGQCTNTEGSYHCECDQGYIMVRKGHCQDINECRHPGTCPDGRCVNSPGSYTCLACEEGYRGQSGSCVDVNECLTPGVCAHGKCTNLEGSFRCSCEQGYEVTSDEKGCQDVDECASRASCPTGLCLNTEGSFACSACENGYWVNEDGTACEDLDECAFPGVCPSGVCTNTAGSFSCKDCDGGYRPSPLGDSCEDVDECEDPQSSCLGGECKNTVGSYQCLCPQGFQLANGTVCEDVNECMGEEHCAPHGECLNSHGSFFCLCAPGFVSAEGGTSCQDVDECATTDPCVGGHCVNTEGSFNCLCETGFQPSPESGECVDIDECEDYGDPVCGTWKCENSPGSYRCVLGCQPGFHMAPNGDCIDIDECANDTMCGSHGFCDNTDGSFRCLCDQGFEISPSGWDCVDVNECELMLAVCGAALCENVEGSFLCLCASDLEEYDAQEGHCRPRGAGGQSMSEAPTGDHAPAPTRMDCYSGQKGHAPCSSVLGRNTTQAECCCTQGASWGDACDLCPSEDSAEFSEICPSGKGYIPVEGAWTFGQTMYTDADECVIFGPGLCPNGRCLNTVPGYVCLCNPGFHYDASHKKCEDHDECQDLACENGECVNTEGSFHCFCSPPLTLDLSQQRCMNSTSSTEDLPDHDIHMDICWKKVTNDVCSEPLRGHRTTYTECCCQDGEAWSQQCALCPPRSSEVYAQLCNVARIEAEREAGVHFRPGYEYGPGPDDLHYSIYGPDGAPFYNYLGPEDTVPEPAFPNTAGHSADRTPILESPLQPSELQPHYVASHPEPPAGFEGLQAEECGILNGCENGRCVRVREGYTCDCFEGFQLDAAHMACVDVNECDDLNGPAVLCVHGYCENTEGSYRCHCSPGYVAEAGPPHCTAKE

SEQ ID NO: 452 - DNA, 7017 bp, Homo sapiens
cctcgctccctctccggtaatgagggggctgagctgtccctccgaggagggggcctggtgtggataaaagagacgaaaaagccgggggaggtttccaaaaataaaaccgtccgggtccccttcagacggctgcaggcacagggaggaggcgcgaaggtgcagcagccgtgcgagcccagctggagtaggagcgcggactcgaggctcggggcgcgcagccctcgttccgccgagagccgggcccccagtcggccgcttcagggccccctagactcagagaagctggccgccgggcggggccgggagaacagcccgcgggcgtccagcgtgccgaccacaaagctcttcgcggtgcccgcgcgcaccactctccagccgccccgcgccatgaggccgcggaccaaagcccgcagcccggggcgcgccctgcggaacccctggagaggcttcctgccgctcaccctggctctcttcgtgggcgcgggtcatgcccaaagggaccccgtagggagatacgagccggctggtggagacgcgaatcgactgcggcgccctgggggcagctacccggcagcggctgcagccaaggtgtacagtctgttccgggagcaggacgcgcctgtcgcgggcttgcagcccgtggagcgggcccagccgggctgggggagccccaggaggcccaccgaggcggaggccaggaggccgtcccgcgcgcagcagtcgcggcgtgtccagccacctgcgcagacccggagaagcactcccctgggccagcagcaaccagcaccccggacccgggccgcgccggctctcccacgcctggggaccccacagcggtctggggctgcgcccccaaccccgccgcgagggcggctcacggggaggaacgtctgcgggggacagtgctgcccaggatggacaacagcaaacagcaccaaccactgtatcaaacccgtttgcgagccgccgtgccagaaccggggctcctgcagccgcccgcagctctgtgtctgccgctctggtttccgtggagcccgctgcgaggaggtcattcccgatgaggaatttgacccccagaactccaggctggcacctcgacgctgggccgagcgttcacccaacctgcgcaggagcagtgcggctggagagggcaccttggccagagcacagccgccagcaccacagtcgccgcccgcaccacagtcgccaccagctgggaccctgagtggcctcagccagacccacccttcccagcagcacgtggggttgtcccgcactgtccgacttcacccgactgccacggccagtagccagctctcttccaacgccctgcccccgggaccaggccttgagcagagagatggcacccaacaggcggtacctctggagcacccctcatccccctgggggctgaacctcacggagaaaatcaagaagatcaagatcgtcttcactcccaccatctgcaagcagacctgtgcccgtggacactgtgccaacagctgtgagaggggcgacaccaccaccctgtacagccagggcggccatgggcacgatcccaagtctggcttccgcatctatttctgccagatcccctgcctgaacggaggccgctgcatcggcagggacgaatgctggtgccccgccaactccaccgggaagttctgccacctgcctatcccgcagccggacagggagcctccagggagggggtcccgccccagggccttgctggaagccccactgaagcagtccactttcacactgccgctctccaaccagctggcctccgtgaacccctccctggtgaaggtgcacattcaccacccacccgaggcctcagtgcagatccaccaggtggcccaggtgcggggcggggtggaggaggccctagtggagaacagcgtggagaccagacccccgccctggctgcctgccagccctggccacagcctctgggacagcaacaacatccctgctcggtctggagagccccctcggccactgcccccagcagcacccaggcctcgaggactgctgggccggtgttacctgaacactgtgaacggacagtgtgccaaccctctgctggagctgactacccaggaggactgctgtggcagtgtgggagccttctggggggtgactttgtgtgccccatgcccacccagaccagcctccccggtgattgagaatggccagctggagtgtcctcaggggtacaagagactgaacctcactcactgccaagatatcaacgagtgcttgaccctgggcctgtgcaaggacgcggagtgtgtgaataccaggggcagctacctgtgcacatgcagacctggcctcatgctggatccatcgcggagccgctgtgtgtcggacaaggcaatctccatgctgcagggactgtgctaccggtcgctggggcccggcacctgcaccctgcctttggcccagcggatcaccaagcagatatgctgctgcagccgcgtgggcaaagcatggggcagcgagtgtgagaaatgccctctgcctggcacagaggccttcagagagatctgccctgccggccacggctacacctacgcgagctccgacatccgcctgtccatgaggaaagccgaggaggaggaactggcaaggcccccaagggagcaagggcagaggagcagcggggcactgcccgggccagcagagaggcagcccctccgggtcgtcacggacacctggcttgaggccgggaccatccctgacaagggtgactctcaggctggccaggtcacgaccagtgtcactcatgcacctgcctgggtcacagggaatgccacaaccccaccaatgcctgaacaggggattgcagagatacaggaagaacaagtgaccccctccaccgatgtgctggtgaccctgagcaccccaggcattgacagatgcgctgctggagccaccaacgtctgtggccctggaacctgcgtgaacctccccgatggatacagatgtgtctgcagccctggctaccagctgcaccccagccaggcctactgcacagatgacaacgagtgtctgagggacccctgcaagggaaaagggcgctgcatcaaccgcgtggggtcctactcctgcttctgctaccctggctacactctggccacctcaggggcgacacaggagtgtcaagatatcaatgagtgtgagcagccaggggtgtgcagcggggggcagtgcaccaacaccgagggctcgtaccactgcgagtgtgatcagggctacatcatggtcaggaaaggacactgccaagatatcaacgaatgccgtcaccccggtacctgccctgatgggagatgcgtcaattcccctggctcctacacttgtctggcctgtgaggagggctaccggggccagagtgggagctgtgtagatgtgaatgagtgtctgactcccggggtctgtgcccatggaaagtgcaccaacctagaaggctccttcagatgctcttgtgagcagggctatgaggtcacctcagatgagaagggctgccaagatgtggatgagtgtgccagccgggcctcatgccccacaggcctctgcctcaacacggagggctccttcgcctgctctgcctgtgagaacgggtactgggtgaatgaagacggcactgcctgtgaagacctagatgagtgtgccttcccgggagtctgcccctccggagtctgcaccaacacggctggctccttctcctgcaaggactgcgatgggggctaccggcccagccccctgggtgactcctgtgaagatgtggatgaatgtgaagacccccagagcagctgcctgggaggcgagtgcaagaacactgtgggctcctaccagtgcctctgtccccagggcttccagctggccaatggcaccgtgtgtgaggatgtgaatgagtgcatgggggaggagcactgcgcaccccacggcgagtgcctcaacagccacgggtctttcttctgtctgtgcgcgcctggcttcgtcagcgcagaggggggcaccagctgccaggatgtggacgagtgtgccaccacagacccgtgtgtgggagggcactgtgtcaacaccgagggctccttcaactgtctatgtgagactggcttccagccctccccagagagtggagagtgtgtggatattgacgagtgtgaggactatggagacccggtgtgtggcacctggaagtgtgaaaacagccctggctcctaccgctgtgttctgggctgccagcctggcttccacatggccccgaacggagactgcattgacatagacgagtgcgccaacgacaccatgtgtggcagccacggcttctgtgacaacactgatggctccttccgctgcctctgtgaccagggcttcgagatctctccctcaggctgggactgtgtggatgtgaacgagtgtgagcttatgctggcggtatgtggggccgcgctctgtgagaacgtggagggctccttcctgtgcctctgtgccagtgacctggaggagtacgatgcccaggaggggcactgccgcccacggggggctggaggtcagagtatgtctgaggccccaacgggggaccatgccccggcccccacccgcatggactgctactccgggcagaagggccatgcgccctgctccagtgtcctgggccggaacaccacacaggctgaatgctgctgcacccagggcgctagctggggagatgcctgtgacctctgcccgtctgaggactcagctgaattcagcgagatctgccctagtggaaaaggctacattcctgtggaaggagcctggacgtttggacagaccatgtacacagatgcggatgagtgtgtgatattcgggcctggtctctgcccgaacggccggtgcctcaacaccgtgcctggttatgtctgcctgtgcaatcccggcttccactacgatgcttcccacaagaagtgtgaggatcacgatgagtgccaggacctggcctgtgagaatggcgagtgcgtcaacacggagggctccttccactgcttctgcagccccccgctcaccctggacctcagccagcagcgctgcatgaacagcaccagcagcacggaggacctccctgaccacgacatccacatggacatctgctggaaaaaagtcaccaatgatgtgtgcagcgaacccctgcgtgggcaccgcaccacctacacggaatgctgctgccaggacggcgaggcctggagccagcagtgtgctctgtgtcccccgaggagctctgaggtctatgctcagctgtgcaacgtggctcgcattgaggcagagcgggaggccggggtccacttccggccaggctatgagtatggccccgggcccgatgacctgcactacagcatctatggcccagatggggcccccttctacaactacctgggccccgaggacaccgtccctgagcctgccttccccaacacagccggtcactcagcggaccgcacacccatccttgagtctcctttgcagccctcagaactccagccccactacgtggccagccatccagagcccccagccggcttcgaagggcttcaggcggaggagtgcggcatcctgaacggctgtgagaatggccgctgtgtgcgcgtgcgggagggctacacctgtgactgttttgagggcttccagctggatgcggcccacatggcctgcgtagatgtgaatgagtgtgatgacttgaacgggcctgctgtgctctgtgtccatggttactgcgagaacacagagggctcctaccgctgccactgctccccgggatatgtggctgaggcagggcccccccactgcactgccaaggagtagcagtcaggggtcagtgtggcaactacctggaaatggcctccagtcacaggcaggggccttgaggatgatttcctagctgggaagacaccgtgacatcaggccagaggtttccaatcagccttgcctgctttcatctctcccagcttagcctctggctgtaagcttcggtcattgcctccatgcccttgcttggctcaagcaccaccaatcgctttaatgcttcagccaccgcatgaggccctgtccaccacctttcctggccttgctatgggatgcttaccaaaggatggccctcatccaccctcccaagctgtgcgagcatgcaaggccccatggcctcacactgcagacacccctttccagccacaatccaccatcatcctgacgatcccacaactgggacagaggctacatctgccctagggaggtccttcagaatctgtggagcaagaaaggatttggggaagcttggggactgactccagagccccctcctaagaaccatcaccaccactcagccaatctgttctgggccctgattttgccacacctccatcctgtagcccattctctgaccccaaggagtggcagaagatcccttcactcagagaagcaaggctgatattagcttgttgaatgtaagagacacaaatgaagaagaacaaagagcctgagaaagcagcaagaggacatgatgaaaaatacgtggagttgatgagaaaggggagccaaggctttatacgtctaaagaaaatattcagtagctgaatccgcccagtgatagcctgtgggcaccagcagcaagggctgccatgggatacagcacccatctacaaagacctctattacataaacactgcttcttacaggaaacaaacctcttctgggatctccttttgtgaaaaccagtttgatgtgctaaaagtaaaaagtctattttccagtgtggtcttgttcagaagcagccagatttccaatgttgtttttcccctccactcagaaacccctgccctttcccttcagaaaacgatggcaggcattcctctgagtttacaagcagagactcactccaacccaaactagctgggagttcagaaccatggtggaataaagaaatgtgcatctggtccaaaaaaaaaaaaaaaaaaaaaaaaaaaaaaaaaa

SEQ ID NO: 453 - protein, 212 aa, Homo sapiens
MNSFSTSAFGPVAFSLGLLLVLPAAFPAPVPPGEDSKDVAAPHRQPLTSSERIDKQIRYILDGISALRKETCNKSNMCESSKEALAENNLNLPKMAEKDGCFQSGFNEETCLVKIITGLLEFEVYLEYLQNRFESSEEQARAVQMSTKVLIQFLQKKAKNLDAITTPDPTTNASLLTKLQAQNQWLQDMTTHLILRSFKEFLQSSLRALRQM

SEQ ID NO: 454 - DNA, 1125 bp, Homo sapiens
ttctgccctcgagcccaccgggaacgaaagagaagctctatctcgcctccaggagcccagctatgaactccttctccacaagcgccttcggtccagttgccttctccctggggctgctcctggtgttgcctgctgccttccctgccccagtacccccaggagaagattccaaagatgtagccgccccacacagacagccactcacctcttcagaacgaattgacaaacaaattcggtacatcctcgacggcatctcagccctgagaaaggagacatgtaacaagagtaacatgtgtgaaagcagcaaagaggcactggcagaaaacaacctgaaccttccaaagatggctgaaaaagatggatgcttccaatctggattcaatgaggagacttgcctggtgaaaatcatcactggtcttttggagtttgaggtatacctagagtacctccagaacagatttgagagtagtgaggaacaagccagagctgtgcagatgagtacaaaagtcctgatccagttcctgcagaaaaaggcaaagaatctagatgcaataaccacccctgacccaaccacaaatgccagcctgctgacgaagctgcaggcacagaaccagtggctgcaggacatgacaactcatctcattctgcgcagctttaaggagttcctgcagtccagcctgagggctcttcggcaaatgtagcatgggcacctcagattgttgttgttaatgggcattccttcttctggtcagaaacctgtccactgggcacagaacttatgttgttctctatggagaactaaaagtatgagcgttaggacactattttaattatttttaatttattaatatttaaatatgtgaagctgagttaatttatgtaagtcatatttatatttttaagaagtaccacttgaaacattttatgtattagttttgaaataataatggaaagtggctatgcagtttgaatatcctttgtttcagagccagatcatttcttggaaagtgtaggcttacctcaaataaatggctaacttatacatatttttaaagaaatatttatattgtatttatataatgtataaatggtttttataccaataaatggcattttaaaaaattc

SEQ ID NO: 455 - protein, 408 aa, Homo sapiens
MIPGNRMLMVVLLCQVLLGGASHASLIPETGKKKVAEIQGHAGGRRSGQSHELLRDFEATLLQMFGLRRRPQPSKSAVIPDYMRDLYRLQSGEEEEEQIHSTGLEYPERPASRANTVRSFHHEEHLENIPGTSENSAFRFLFNLSSIPENEAISSAELRLFREQVDQGPDWERGFHRINIYEVMKPPAEVVPGHLITRLLDTRLVHHNVTRWETFDVSPAVLRWTREKQPNYGLAIEVTHLHQTRTHQGQHVRISRSLPQGSGNWAQLRPLLVTFGHDGRGHALTRRRRAKRSPKHHSQRARKKNKNCRRHSLYVDFSDVGWNDWIVAPPGYQAFYCHGDCPFPLADHLNSTNHAIVQTLVNSVNSSIPKACCVPTELSAISMLYLDEYDKVVLKNYQEMVVEGCGCR

SEQ ID NO: 456 - DNA, 1999 bp, Homo sapiens
gagggaggggccgccggggaagaggaggaggaaggaaagaaagaaagcgagggagggaaagaggaggaaggaagatgcgagaaggcagaggaggagggagggagggaaggagcgcggagcccggcccggaagctaggtgagtgtggcatccgagctgagggacgcgagcctgagacgccgctgctgctccggctgagtatctagcttgtctccccgatgggattcccgtccaagctatctcgagcctgcagcgccacagtccccggccctcgcccaggttcactgcaaccgttcagaggtccccaggagctgctgctggcgagcccgctactgcagggacctatggagccattccgtagtgccatcccgagcaacgcactgctgcagcttccctgagcctttccagcaagtttgttcaagattggctgtcaagaatcatggactgttattatatgccttgttttctgtcaagacaccatgattcctggtaaccgaatgctgatggtcgttttattatgccaagtcctgctaggaggcgcgagccatgctagtttgatacctgagacggggaagaaaaaagtcgccgagattcagggccacgcgggaggacgccgctcagggcagagccatgagctcctgcgggacttcgaggcgacacttctgcagatgtttgggctgcgccgccgcccgcagcctagcaagagtgccgtcattccggactacatgcgggatctttaccggcttcagtctggggaggaggaggaagagcagatccacagcactggtcttgagtatcctgagcgcccggccagccgggccaacaccgtgaggagcttccaccacgaagaacatctggagaacatcccagggaccagtgaaaactctgcttttcgtttcctctttaacctcagcagcatccctgagaacgaggcgatctcctctgcagagcttcggctcttccgggagcaggtggaccagggccctgattgggaaaggggcttccaccgtataaacatttatgaggttatgaagcccccagcagaagtggtgcctgggcacctcatcacacgactactggacacgagactggtccaccacaatgtgacacggtgggaaacttttgatgtgagccctgcggtccttcgctggacccgggagaagcagccaaactatgggctagccattgaggtgactcacctccatcagactcggacccaccagggccagcatgtcaggattagccgatcgttacctcaagggagtgggaattgggcccagctccggcccctcctggtcacctttggccatgatggccggggccatgccttgacccgacgccggagggccaagcgtagccctaagcatcactcacagcgggccaggaagaagaataagaactgccggcgccactcgctctatgtggacttcagcgatgtgggctggaatgactggattgtggccccaccaggctaccaggccttctactgccatggggactgcccctttccactggctgaccacctcaactcaaccaaccatgccattgtgcagaccctggtcaattctgtcaattccagtatccccaaagcctgttgtgtgcccactgaactgagtgccatctccatgctgtacctggatgagtatgataaggtggtactgaaaaattatcaggagatggtagtagagggatgtgggtgccgctgagatcaggcagtccttgaggatagacagatatacacaccacacacacacaccacatacaccacacacacacgttcccatccactcacccacacactacacagactgcttccttatagctggacttttatttaaaaaaaaaaaaaaaaaaatggaaaaaatccctaaacattcaccttgaccttatttatgactttacgtgcaaatgttttgaccatattgatcatatattttgacaaaatatatttataactacgtattaaaagaaaaaaataaaatgagtcattattttaaaggt

SEQ ID NO: 457 - protein, 469 aa, Homo sapiens
MSIHFSSPVFTSRSAAFSGRGAQVRLSSARPGGLGSSSLYGLGASRPRVAVRSAYGGPVGAGIREVTINQSLLAPLRLDADPSLQRVRQEESEQIKALNNKFASFIDKVRFLEQQNKLLETKWTLLQEQKSAKSSRLPDIFEAQIAGLRGQLEALQVDGGRLEQGLRTMQDVVEDFKNKYEDEINRRTAAENEFVVLKKDVDAAYMSKVELEAKVDALNDEINFLRTLNETELTELQSQISDTSVVLSMDNSRSLDLDGIIAEVKAQYEEMAKCSRAEAEAWYQTKFETLQAQAGKHGDDLRNTRNEISEMNRAIQRLQAEIDNIKNQRAKLEAAIAEAEECGELALKDARAKQEELEAALQRAKQDMARQLREYQELMSVKLALDIEIATYRKLLEGEESRLAGDGVGAVNISVMNSTGGSSSGGGIGLTLGGTMGSNALSFSSSAGPGLLKAYSIRTASASRRSARD

SEQ ID NO: 458 - DNA, 1466 bp, Homo sapiens
acggcgagtgcgcgctcctcctcgcccgccgctaggtccatcccggcccagccaccatgtccatccacttcagctccccggtattcacctcgcgctcagccgccttctcgggccgcggcgcccaggtgcgcctgagctccgctcgccccggcggccttggcagcagcagcctctacggcctcggcgcctcgcggccgcgcgtggccgtgcgctctgcctatgggggcccggtgggcgccggcatccgcgaggtcaccattaaccagagcctgctggccccgctgcggctggacgccgacccctccctccagcgggtgcgccaggaggagagcgagcagatcaaggccctcaacaacaagtttgcctccttcatcgacaaggtgcggtttctggagcagcagaacaagctgctggagaccaagtggacgctgctgcaggagcagaagtcggccaagagcagccgcctcccagacatctttgaggcccagattgctggccttcggggtcagcttgaggcactgcaggtggatgggggccgcctggagcaggggctgcggacgatgcaggatgtggtggaggacttcaagaataagtacgaagatgaaattaaccgccgcacagctgctgagaatgagtttgtggtcctgaagaaggatgtggatgctgcctacatgagcaaggtggagctggaggccaaggtggatgccctgaatgatgagatcaacttcctcaggaccctcaatgagacggagttgacagagctgcagtcccagatctccgacacatctgtggtgctgtccatggacaacagtcgctccctggacctggacggcatcatcgctgaggtcaaggcacagtatgaggagatggccaaatgcagccgggctgaggctgaagcctggtaccagaccaagtttgagaccctccaggcccaggctgggaagcatggggacgacctccggaatacccggaatgagatttcagagatgaaccgggccatccagaggctgcaggctgagatcgacaacatcaagaaccagcgtgccaagttggaggccgccattgccgaggctgaggagtgtggggagctggcgctcaaggatgctcgtgccaagcaggaggagctggaagccgccctgcagcgggccaagcaggatatggcacggcagctgcgtgagtaccaggaactcatgagcgtgaagctggccctggacatcgagatcgccacctaccgcaagctgctggagggcgaggagagccggttggctggagatggagtgggagccgtgaatatctctgtgatgaattccactggtggcagtagcagtggcggtggcattgggctgaccctcgggggaaccatgggcagcaatgccctgagcttctccagcagtgcgggtcctgggctcctgaaggcttattccatccggaccgcatccgccagtcgcaggagtgcccgcgactga

SEQ ID NO: 459 - protein, 1180 aa, Homo sapiens
MQLKIMPKKKRLSAGRVPLILFLCQMISALEVPLDPKLLEDLVQPPTITQQSPKDYIIDPRENIVIQCEAKGKPPPSFSWTRNGTHFDIDKDPLVTMKPGTGTLIINIMSEGKAETYEGVYQCTARNERGAAVSNNIVVRPSRSPLWTKEKLEPITLQSGQSLVLPCRPPIGLPPPIIFWMDNSFQRLPQSERVSQGLNGDLYFSNVLPEDTREDYICYARFNHTQTIQQKQPISVKVISAKSSRERPPTFLTPEGNASNKEELRGNVLSLECIAEGLPTPIIYWAKEDGMLPKNRTVYKNFEKTLQIIHVSEADSGNYQCIAKNALGAIHHTISVRVKAAPYWITAPQNLVLSPGEDGTLICRANGNPKPRISWLTNGVPIEIAPDDPSRKIDGDTIIFSNVQERSSAVYQCNASNEYGYLLANAFVNVLAEPPRILTPANTLYQVIANRPALLDCAFFGSPLPTIEWFKGAKGSALHEDIYVLHENGTLEIPVAQKDSTGTYTCVARNKLGMAKNEVHLEIKDATWIVKQPEYAVVQRGSMVSFECKVKHDHTLSLTVLWLKDNRELPSDERFTVDKDHLVVADVSDDDSGTYTCVANTTLDSVSASAVLSVVAPTPTPAPVYDVPNPPFDLELTDQLDKSVQLSWTPGDDNNSPITKFIIEYEDAMHKPGLWHHQTEVSGTQTTAQLNLSPYVNYSFRVMAVNSIGKSLPSEASEQYLTKASEPDKNPTAVEGLGSEPDNLVITWKPLNGFESNGPGLQYKVSWRQKDGDDEWTSVVVANVSKYIVSGTPTFVPYLIKVQALNDMGFAPEPAVVMGHSGEDLPMVAPGNVRVNVVNSTLAEVHWDPVPLKSIRGHLQGYRIYYWKTQSSSKRNRRHIEKKILTFQGSKTHGMLPGLEPFSHYTLNVRVVNGKGEGPASPDRVFNTPEGVPSAPSSLKIVNPTLDSLTLEWDPPSHPNGILTEYTLKYQPINSTHELGPLVDLKIPANKTRWTLKNLNFSTRYKFYFYAQTSAGSGSQITEEAVTTVDEAMASRQVDIATQGWFIGLMCAVALLILILLIVCFIRRNKGGKYPVKEKEDAHADPEIQPMKEDDGTFGEYSDAEDHKPLKKGSRTPSDRTVKKEDSDDSLVDYGEGVNGQFNEDGSFIGQYSGKKEKEPAEGNESSEAPSPVNAMNSFV

SEQ ID NO: 460 - DNA, 6218 bp, Homo sapiens
agcttcgtcgagaacggaggacaccggcggtccagggtcctgggcagtcgcgccagagctgagcggagggcgcggcgcgagaacgaatctttgtgacattctctctcagcattctttatcccctgtttgctgaagacttcgaccaaagctggtcttagctgttggcattctcctgagaaaaggatagcttcagaaatcagaaaaacatttgggaggtgtctagcccagtggaccttctgaagagcaatgctaagaagacgtttggtttaaagaattaaaaggaagaacaacttaagagcttcttcaaagtttcccgcatgaaaattacttaaacttgcacacaacgtttcacaaaatcttttgtgaaagaagaaaaggaaattcagtgtgtgagtctcagcaggagttaagctaatgcagcttaaaataatgccgaaaaagaagcgcttatctgcgggcagagtgcccctgattctcttcctgtgccagatgattagtgcactggaagtacctcttgatccaaaacttcttgaagacttggtacagcctccaaccatcacccaacagtctccaaaagattacattattgaccctcgggagaatattgtaatccagtgtgaagccaaagggaaaccgcccccaagcttttcctggacccgtaatgggactcattttgacatcgataaagaccctctggtcaccatgaagcctggcacaggaacgctcataattaacatcatgagcgaagggaaagctgagacctatgaaggagtctatcagtgtacagcaaggaacgaacgcggagctgcagtttctaataacattgttgtccgcccatccagatcaccattgtggaccaaagaaaaacttgaaccaatcacacttcaaagtggtcagtctttagtacttccctgcagacccccaattggattaccaccacctataatattttggatggataattcctttcaaagacttccacaaagtgagagagtttctcaaggtttgaatggggacctttatttttccaatgtcctcccagaggacacccgcgaagactatatctgttatgctagatttaatcatactcaaaccatacagcagaagcaacctatttctgtgaaggtgatttcagctaaatcaagtagagagaggccaccaacatttttaactccagaaggcaatgcaagtaacaaagaggaattaagaggaaatgtgctttcactggagtgcattgcagaaggactgcctaccccaattatttactgggcaaaggaagatggaatgctacccaaaaacaggacagtttataagaactttgagaaaaccttgcagatcattcatgtttcagaagcagactctggaaattaccaatgtatagcaaaaaatgcattaggagccatccaccataccatttctgttagagttaaagcggctccatactggatcacagcccctcaaaatcttgtgctgtccccaggagaggatgggaccttgatctgcagagctaatggcaaccccaaacccagaattagctggttaacaaatggagtcccaatagaaattgcccctgatgaccccagcagaaaaatagatggcgataccattattttttcaaatgttcaagaaagatcaagtgcagtctatcagtgcaatgcctctaatgaatatggatatttactggcaaacgcatttgtaaatgtgctggctgagccaccacgaatcctcacacctgcaaacacactctaccaggtcattgcaaacaggcctgctttactagactgtgccttctttgggtctcctctcccaaccatcgagtggtttaaaggagctaaaggaagtgctcttcatgaagatatttatgttttacatgaaaatggaactttggaaattcctgtggcccaaaaggacagtacaggaacttatacgtgtgttgcaaggaataaattagggatggcaaagaatgaagttcacttagaaatcaaagatgctacatggatcgttaaacagcccgaatatgcagttgtgcaaagagggagcatggtgtcctttgaatgcaaagtgaaacatgatcacaccttatccctcactgtcctgtggctgaaggacaacagggaactgcccagtgatgaaaggttcactgttgacaaggatcatctagtggtagctgatgtcagtgacgatgacagcgggacctacacgtgtgtggccaacaccactctggacagcgtctccgccagcgctgtgcttagcgttgttgctcctactccaactccagctcccgtttacgatgtcccaaatcctccctttgacttagaactgacagatcaacttgacaaaagtgttcagctgtcatggaccccaggcgatgacaacaatagccccattacaaaattcatcatcgaatatgaagatgcaatgcacaagccagggctgtggcaccaccaaactgaagtttctggaacacagaccacagcccagctgaacctgtctccttacgtgaactactccttccgcgtgatggcagtgaacagcattgggaagagcttgcccagcgaggcgtctgagcagtatttgacgaaagcctcagaaccagataaaaaccccacagctgtggaaggactgggatcagagcctgataatttggtgattacgtggaagcccttgaatggtttcgaatctaatgggccaggccttcagtacaaagttagctggcgccagaaagatggtgatgatgaatggacatctgtggttgtggcaaatgtatccaaatatattgtctcaggcacgccaacctttgttccatacctgatcaaagttcaggccctgaatgacatggggtttgcccccgagccagctgtagtcatgggacattctggagaagacctcccaatggtggctcctgggaacgtgcgtgtgaatgtggtgaacagtaccttagccgaggtgcactgggacccagtacctctgaaaagcatccgaggacacctacaaggctatcggatttactattggaagacccagagttcatctaaaagaaacagacgtcacattgagaaaaagatcctcaccttccaaggcagcaagactcatggcatgttgccggggctagagccctttagccactacacactgaatgtccgagtggtcaatgggaaaggggagggcccagccagccctgacagagtctttaatactccagaaggagtccccagtgctccctcgtctttgaagattgtgaatccaacactggactctctcactttggaatgggatccaccgagccacccgaatggcattttgacagagtacaccttaaagtatcagccaattaacagcacacatgaattaggccctctggtagatttgaaaattcctgccaacaagacacggtggactttaaaaaatttaaatttcagcactcgatataagttttatttctatgcacaaacatcagcaggatcaggaagtcaaattacagaggaagcagtaacaactgtggatgaagcgatggcaagccggcaggtggatattgcaactcagggctggttcattggtctgatgtgtgctgttgctctccttatcttaattttgctgattgtttgcttcatcagaagaaacaagggtggtaaatatccagttaaagaaaaggaagatgcccatgctgaccctgaaatccagcctatgaaggaagatgatgggacatttggagaatacagtgatgcagaagaccacaagcctttgaaaaaaggaagtcgaactccttcagacaggactgtgaaaaaagaagatagtgacgacagcctagttgactatggagaaggggttaatggccagttcaatgaggatggctcctttattggacaatacagtggtaagaaagagaaagagccggctgaaggaaacgaaagctcagaggcaccttctcctgtcaacgccatgaattcctttgtttaatttttaagctctttgccaatattccatttctctagaatgtttatcctaagcacttgtttgtcagccctctcatactatgaacatatgggtagagagtatattttctgctgtatgttagtattatgagaatagttacagcaaaaacataactcagtcaaatgatatgttaatatgaactggaatgcaaagtgcatactttttcattcaaaatgggtattcttgatttcctcagaactgataaaaaataatgcaacatcaccaacagatcctgttatttcctctgcaggatacagttcaatatgatgcatgaaaaatgctccacatttaaaggacatacccgtgtatgttatgaaaacatggtttgatactttgtttatactaccctcagctgaacccctatatatgaattccgttttcattgtcaagagtgttactgtagtattctctagaacttcaatgtctttgtggacattgttgtgaaattggtgactatgtatagctgtcgttagtctttttgggagactgttaggaacagtttgtacagtatatacttgctaaatgagttcattatgacagtcacattgctgatgcttactgagaactattacctactcttggctcctgttactccgtaggcttcttaatcttccaggcattacagcagcacagtgttctactttttacatcatttctatgttcggttgtttttaggcataaacaatgtgtattgcagtgcatttcggcatttgtgccatactgaaagaatcaaaaacaaatcatccaaattaaatttcaaacattatttcagagaacacagggcaagacacatacagtgccttcagatattaagcattccacaacatcgtgcattctgtatcagctggtccagtccattctgggtcctagattactgtcattgtctaaaagtaacttttaaaaagcagagttcatgaaaactgcaatgctgggaaaagaaggaaacatgaaaataaaaataagacagtttattagaaatagcatttcctcataagcataaaaagaaaatctttgttgccaactgaagcacatgatgattttgtggtcctttatggtttctattacatgcagtaagaaagatgtcaacatgctagaaaattaattttaaaactaagttattccaacactaaaagcatacaacagcatgccaacagtaatatattattctccaagactttacctatgtaagtgttcaaaactctgcagcattaaacaacgtgtatgcaaattgttatggatacatttcagaatctaagaaatcaggcaagtgcttaaaaggccaacggtccaagggattacatctgcagtttaaaaagtaaatatatattctatcgtattcataaacaatatctatcaaatgggttacctccaaatatgaaaatctataacaacctatggttgaaggaatgctcagtttcatttgccaataaattggtttctcataacttgcatcaagtttaattttaagtaaagctttttatatgtagatattttgttgaatttgtaaatacacttaaaatgtagatgctatatgcttataggtgttacatacaaataaacatgcaatgtttatgttgtactgtataagaggtaagctaattaatgcagtgaatgggattggaaagcatctacttaaatatctattgggttcccccctccccccaccttttttgctgtgaaactgaaatagtgaacttttctacgtattgacagcagatttttcgatgaaatcttcagagctttgcctatggggcacagtaggcctagtaacctggcatgtttgatatatgtaggtaaagcataatttaaagtaatcccaggtaaagatggccctaaatactttcatgtctctatattcatttttcacagatccacctgtctcttgaaaatataaaaagacaaaacaggtttgccttggcatcagagagcacaaagattaaaagttactttaaatttgccaatattttgggagaacaataaaactacattttttcctcttccatactggtagatgcgaaatttatctgtgcatgaaagggtcacttctgtaatagtgcaacagatttggtattaaaaattaaatgtggttttaaaagttcctctctcttttgtaatttatgttcccaattgagtgtgaatgtccaagtaatggtgtatgtaatggtacaggcaaatgtgactggatttccctcaaaaaagtaactattaaacagtcttgatctctt

SEQ ID NO: 461 - protein, 469 aa, Homo sapiens
MHSFPPLLLLLFWGVVSHSFPATLETQEQDVDLVQKYLEKYYNLKNDGRQVEKRRNSGPVVEKLKQMQEFFGLKVTGKPDAETLKVMKQPRCGVPDVAQFVLTEGNPRWEQTHLTYRIENYTPDLPRADVDHAIEKAFQLWSNVTPLTFTKVSEGQADIMISFVRGDHRDNSPFDGPGGNLAHAFQPGPGIGGDAHFDEDERWTNNFREYNLHRVAAHELGHSLGLSHSTDIGALMYPSYTFSGDVQLAQDDIDGIQAIYGRSQNPVQPIGPQTPKACDSKLTFDAITTIRGEVMFFKDRFYMRTNPFYPEVELNFISVFWPQLPNGLEAAYEFADRDEVRFFKGNKYWAVQGQNVLHGYPKDIYSSFGFPRTVKHIDAALSEENTGKTYFFVANKYWRYDEYKRSMDPGYPKMIAHDFPGIGHKVDAVFMKDGFFYFFHGTRQYKFDPKTKRILTLQKANSWFNCRKN

SEQ ID NO: 462 - DNA, 1973 bp, Homo sapiens
gggatattggagtagcaagaggctgggaagccatcacttaccttgcactgagaaagaagacaaaggccagtatgcacagctttcctccactgctgctgctgctgttctggggtgtggtgtctcacagcttcccagcgactctagaaacacaagagcaagatgtggacttagtccagaaatacctggaaaaatactacaacctgaagaatgatgggaggcaagttgaaaagcggagaaatagtggcccagtggttgaaaaattgaagcaaatgcaggaattctttgggctgaaagtgactgggaaaccagatgctgaaaccctgaaggtgatgaagcagcccagatgtggagtgcctgatgtggctcagtttgtcctcactgaggggaaccctcgctgggagcaaacacatctgacctacaggattgaaaattacacgccagatttgccaagagcagatgtggaccatgccattgagaaagccttccaactctggagtaatgtcacacctctgacattcaccaaggtctctgagggtcaagcagacatcatgatatcttttgtcaggggagatcatcgggacaactctccttttgatggacctggaggaaatcttgctcatgcttttcaaccaggcccaggtattggaggggatgctcattttgatgaagatgaaaggtggaccaacaatttcagagagtacaacttacatcgtgttgcggctcatgaactcggccattctcttggactctcccattctactgatatcggggctttgatgtaccctagctacaccttcagtggtgatgttcagctagctcaggatgacattgatggcatccaagccatatatggacgttcccaaaatcctgtccagcccatcggcccacaaaccccaaaagcgtgtgacagtaagctaacctttgatgctataactacgattcggggagaagtgatgttctttaaagacagattctacatgcgcacaaatcccttctacccggaagttgagctcaatttcatttctgttttctggccacaactgccaaatgggcttgaagctgcttacgaatttgccgacagagatgaagtccggtttttcaaagggaataagtactgggctgttcagggacagaatgtgctacacggataccccaaggacatctacagctcctttggcttccctagaactgtgaagcatatcgatgctgctctttctgaggaaaacactggaaaaacctacttctttgttgctaacaaatactggaggtatgatgaatataaacgatctatggatccaggttatcccaaaatgatagcacatgactttcctggaattggccacaaagttgatgcagttttcatgaaagatggatttttctatttctttcatggaacaagacaatacaaatttgatcctaaaacgaagagaattttgactctccagaaagctaatagctggttcaactgcaggaaaaattgaacattactaatttgaatggaaaacacatggtgtgagtccaaagaaggtgttttcctgaagaactgtctattttctcagtcatttttaacctctagagtcactgatacacagaatataatcttatttatacctcagtttgcatatttttttactatttagaatgtagccctttttgtactgatataatttagttccacaaatggtgggtacaaaaagtcaagtttgtggcttatggattcatataggccagagttgcaaagatcttttccagagtatgcaactctgacgttgatcccagagagcagcttcagtgacaaacatatcctttcaagacagaaagagacaggagacatgagtctttgccggaggaaaagcagctcaagaacacatgtgcagtcactggtgtcaccctggataggcaagggataactcttctaacacaaaataagtgttttatgtttggaataaagtcaaccttgtttctactgtttt

SEQ ID NO: 463 - protein, 273 aa, Homo sapiens
MKKTQTWILTCIYLQLLLFNPLVKTEGICRNRVTNNVKDVTKLVANLPKDYMITLKYVPGMDVLPSHCWISEMVVQLSDSLTDLLDKFSNISEGLSNYSIIDKLVNIVDDLVECVKENSSKDLKKSFKSPEPRLFTPEEFFRIFNRSIDAFKDFVVASETSDCVVSSTLSPEKDSRVSVTKPFMLPPVAASSLRNDSSSSNRKAKNPPGDSSLHWAAMALPALFSLIIGFAFGALYWKKRQPSLTRAVENIQINEEDNEISMLQEKEREFQEV

SEQ ID NO: 464 - DNA, 1405 bp, Homo sapiens
ccgcctcgcgccgagactagaagcgctgcgggaagcagggacagtggagagggcgctgcgctcgggctacccaatgcgtggactatctgccgccgctgttcgtgcaatatgctggagctccagaacagctaaacggagtcgccacaccactgtttgtgctggatcgcagcgctgcctttccttatgaagaagacacaaacttggattctcacttgcatttatcttcagctgctcctatttaatcctctcgtcaaaactgaagggatctgcaggaatcgtgtgactaataatgtaaaagacgtcactaaattggtggcaaatcttccaaaagactacatgataaccctcaaatatgtccccgggatggatgttttgccaagtcattgttggataagcgagatggtagtacaattgtcagacagcttgactgatcttctggacaagttttcaaatatttctgaaggcttgagtaattattccatcatagacaaacttgtgaatatagtcgatgaccttgtggagtgcgtcaaagaaaactcatctaaggatctaaaaaaatcattcaagagcccagaacccaggctctttactcctgaagaattctttagaatttttaatagatccattgatgccttcaaggactttgtagtggcatctgaaactagtgattgtgtggtttcttcaacattaagtcctgagaaagattccagagtcagtgtcacaaaaccatttatgttaccccctgttgcagccagctcccttaggaatgacagcagtagcagtaataggaaggccaaaaatccccctggagactccagcctacactgggcagccatggcattgccagcattgttttctcttataattggctttgcttttggagccttatactggaagaagagacagccaagtcttacaagggcagttgaaaatatacaaattaatgaagaggataatgagataagtatgttgcaagagaaagagagagagtttcaagaagtgtaaattgtggcttgtatcaacactgttactttcgtacattggctggtaacagttcatgtttgcttcataaatgaagcagctttaaacaaattcatattctgtctggagtgacagaccacatctttatctgttcttgctacccatgactttatatggatgattcagaaattggaacagaatgttttactgtgaaactggcactgaattaatcatctataaagaagaacttgcatggagcaggactctattttaaggactgcgggacttgggtctcatttagaacttgcagctgatgttggaagagaaagcacgtgtctcagactgcatgtaccatttgcatggctccagaaatgtctaaatgctgaaaaaacacctagctttattcttcagatacaaactgcag

SEQ ID NO: 465 - protein, 431 aa, Homo sapiens
MRALLARLLLCVLVVSDSKGSNELHQVPSNCDCLNGGTCVSNKYFSNIHWCNCPKKFGGQHCEIDKSKTCYEGNGHFYRGKASTDTMGRPCLPWNSATVLQQTYHAHRSDALQLGLGKHNYCRNPDNRRRPWCYVQVGLKPLVQECMVHDCADGKKPSSPPEELKFQCGQKTLRPRFKIIGGEFTTIENQPWFAAIYRRHRGGSVTYVCGGSLISPCWVISATHCFIDYPKKEDYIVYLGRSRLNSNTQGEMKFEVENLILHKDYSADTLAHHNDIALLKIRSKEGRCAQPSRTIQTICLPSMYNDPQFGTSCEITGFGKENSTDYLYPEQLKMTVVKLISHRECQQPHYYGSEVTTKMLCAADPQWKTDSCQGDSGGPLVCSLQGRMTLTGIVSWGRGCALKDKPGVYTRVSHFLPWIRSHTKEENGLAL

SEQ ID NO: 466 - DNA, 2304 bp, Homo sapiens
gtccccgcagcgccgtcgcgccctcctgccgcaggccaccgaggccgccgccgtctagcgccccgacctcgccaccatgagagccctgctggcgcgcctgcttctctgcgtcctggtcgtgagcgactccaaaggcagcaatgaacttcatcaagttccatcgaactgtgactgtctaaatggaggaacatgtgtgtccaacaagtacttctccaacattcactggtgcaactgcccaaagaaattcggagggcagcactgtgaaatagataagtcaaaaacctgctatgaggggaatggtcacttttaccgaggaaaggccagcactgacaccatgggccggccctgcctgccctggaactctgccactgtccttcagcaaacgtaccatgcccacagatctgatgctcttcagctgggcctggggaaacataattactgcaggaacccagacaaccggaggcgaccctggtgctatgtgcaggtgggcctaaagccgcttgtccaagagtgcatggtgcatgactgcgcagatggaaaaaagccctcctctcctccagaagaattaaaatttcagtgtggccaaaagactctgaggccccgctttaagattattgggggagaattcaccaccatcgagaaccagccctggtttgcggccatctacaggaggcaccgggggggctctgtcacctacgtgtgtggaggcagcctcatcagcccttgctgggtgatcagcgccacacactgcttcattgattacccaaagaaggaggactacatcgtctacctgggtcgctcaaggcttaactccaacacgcaaggggagatgaagtttgaggtggaaaacctcatcctacacaaggactacagcgctgacacgcttgctcaccacaacgacattgccttgctgaagatccgttccaaggagggcaggtgtgcgcagccatcccggactatacagaccatctgcctgccctcgatgtataacgatccccagtttggcacaagctgtgagatcactggctttggaaaagagaattctaccgactatctctatccggagcagctgaaaatgactgttgtgaagctgatttcccaccgggagtgtcagcagccccactactacggctctgaagtcaccaccaaaatgctatgtgctgctgacccccaatggaaaacagattcctgccagggagactcagggggacccctcgtctgttccctccaaggccgcatgactttgactggaattgtgagctggggccgtggatgtgccctgaaggacaagccaggcgtctacacgagagtctcacacttcttaccctggatccgcagtcacaccaaggaagagaatggcctggccctctgagggtccccagggaggaaacgggcaccacccgctttcttgctggttgtcatttttgcagtagagtcatctccatcagctgtaagaagagactgggaagataggctctgcacagatggatttgcctgtggcaccaccagggtgaacgacaatagctttaccctcacggataggcctgggtgctggctgcccagaccctctggccaggatggaggggtggtcctgactcaacatgttactgaccagcaacttgtctttttctggactgaagcctgcaggagttaaaaagggcagggcatctcctgtgcatgggctcgaagggagagccagctcccccgaccggtgggcatttgtgaggcccatggttgagaaatgaataatttcccaattaggaagtgtaagcagctgaggtctcttgagggagcttagccaatgtgggagcagcggtttggggagcagagacactaacgacttcagggcagggctctgatattccatgaatgtatcaggaaatatatatgtgtgtgtatgtttgcacacttgttgtgtgggctgtgagtgtaagtgtgagtaagagctggtgtctgattgttaagtctaaatatttccttaaactgtgtggactgtgatgccacacagagtggtctttctggagaggttataggtcactcctggggcctcttgggtcccccacgtgacagtgcctgggaatgtacttattctgcagcatgacctgtgaccagcactgtctcagtttcactttcacatagatgtccctttcttggccagttatcccttccttttagcctagttcatccaatcctcactgggtggggtgaggaccactccttacactgaatatttatatttcactatttttatttatatttttgtaattttaaataaaagtgatcaataaaatgtgatttttctga

SEQ ID NO: 467 - protein, 402 aa, Homo sapiens [sequence omitted]

SEQ ID NO: 468 - DNA, 2876 bp, Homo sapiens
gaattcctgcagctcagcagccgccgccagagcaggacgaaccgccaatcgcaaggcacctctgagaacttcaggatgcagatgtctccagccctcacctgcctagtcctgggcctggcccttgtctttggtgaagggtctgctgtgcaccatcccccatcctacgtggcccacctggcctcagacttcggggtgagggtgtttcagcaggtggcgcaggcctccaaggaccgcaacgtggttttctcaccctatggggtggcctcggtgttggccatgctccagctgacaacaggaggagaaacccagcagcagattcaagcagctatgggattcaagattgatgacaagggcatggcccccgccctccggcatctgtacaaggagctcatggggccatggaacaaggatgagatcagcaccacagacgcgatcttcgtccagcgggatctgaagctggtccagggcttcatgccccacttcttcaggctgttccggagcacggtcaagcaagtggacttttcagaggtggagagagccagattcatcatcaatgactgggtgaagacacacacaaaaggtatgatcagcaacttgcttgggaaaggagccgtggaccagctgacacggctggtgctggtgaatgccctctacttcaacggccagtggaagactcccttccccgactccagcacccaccgccgcctcttccacaaatcagacggcagcactgtctctgtgcccatgatggctcagaccaacaagttcaactatactgagttcaccacgcccgatggccattactacgacatcctggaactgccctaccacggggacaccctcagcatgttcattgctgccccttatgaaaaagaggtgcctctctctgccctcaccaacattctgagtgcccagctcatcagccactggaaaggcaacatgaccaggctgccccgcctcctggttctgcccaagttctccctggagactgaagtcgacctcaggaagcccctagagaacctgggaatgaccgacatgttcagacagtttcaggctgacttcacgagtctttcagaccaagagcctctccacgtcgcgcaggcgctgcagaaagtgaagatcgaggtgaacgagagtggcacggtggcctcctcatccacagctgtcatagtctcagcccgcatggcccccgaggagatcatcatggacagacccttcctctttgtggtccggcacaaccccacaggaacagtccttttcatgggccaagtgatggaaccctgaccctggggaaagacgccttcatctgggacaaaactggagatgcatcgggaaagaagaaactccgaagaaaagaattttagtgttaatgactctttctgaaggaagagaagacatttgccttttgttaaaagatggtaaaccagatctgtctccaagaccttggcctctccttggaggacctttaggtcaaactccctagtctccacctgagaccctgggagagaagtttgaagcacaactcccttaaggtctccaaaccagacggtgacgcctgcgggaccatctggggcacctgcttccacccgtctctctgcccactcgggtctgcagacctggttcccactgaggccctttgcaggatggaactacggggcttacaggagcttttgtgtgcctggtagaaactatttctgttccagtcacattgccatcactcttgtactgcctgccaccgcggaggaggctggtgacaggccaaaggccagtggaagaaacaccctttcatctcagagtccactgtggcactggccacccctccccagtacaggggtgctgcaggtggcagagtgaatgtcccccatcatgtggcccaactctcctggcctggccatctccctccccagaaacagtgtgcatgggttattttggagtgtaggtgacttgtttactcattgaagcagatttctgcttccttttatttttataggaatagaggaagaaatgtcagatgcgtgcccagctcttcaccccccaatctcttggtggggaggggtgtacctaaatatttatcatatccttgcccttgagtgcttgttagagagaaagagaactactaaggaaaataatattatttaaactcgctcctagtgtttctttgtggtctgtgtcaccgtatctcaggaagtccagccacttgactggcacacacccctccggacatccagcgtgacggagcccacactgccaccttgtggccgcctgagaccctcgcgccccccgcgccccccgcgcccctctttttccccttgatggaaattgaccatacaatttcatcctccttcaggggatcaaaaggacggagtggggggacagagactcagatgaggacagagtggtttccaatgtgttcaatagatttaggagcagaaatgcaaggggctgcatgacctaccaggacagaactttccccaattacagggtgactcacagccgcattggtgactcacttcaatgtgtcatttccggctgctgtgtgtgagcagtggacacgtgaggggggggtgggtgagagagacaggcagctcggattcaactaccttagataatatttctgaaaacctaccagccagagggtagggcacaaagatggatgtaatgcactttgggaggccaaggcgggaggattgcttgagcccaggagttcaagaccagcctgggcaacataccaagacccccgtctctttaaaaatatatatattttaaatatacttaaatatatatttctaatatctttaaatatatatatatattttaaagaccaatttatgggagaattgcacacagatgtgaaatgaatgtaatctaatagaagc

SEQ ID NO: 469 - protein, 830 aa, Homo sapiens
MANCQIAILYQRFQRVVFGISQLLCFSALISELTNQKEVAAWTYHYSTKAYSWNISRKYCQNRYTDLVAIQNKNEIDYLNKVLPYYSSYYWIGIRKNNKTWTWVGTKKALTNEAENWADNEPNNKRNNEDCVEIYIKSPSAPGKWNDEHCLKKKHALCYTASCQDMSCSKQGECLETIGNYTCSCYPGFYGPECEYVRECGELELPQHVLMNCSHPLGNFSFNSQCSFHCTDGYQVNGPSKLECLASGIWTNKPPQCLAAQCPPLKIPERGNMICLHSAKAFQHQSSCSFSCEEGFALVGPEVVQCTASGVWTAPAPVCKAVQCQHLEAPSEGTMDCVHPLTAFAYGSSCKFECQPGYRVRGLDMLRCIDSGHWSAPLPTCEAISCEPLESPVHGSMDCSPSLRAFQYDTNCSFRCAEGFMLRGADIVRCDNLGQWTAPAPVCQALQCQDLPVPNEARVNCSHPFGAFRYQSVCSFTCNEGLLLVGASVLQCLATGNWNSVPPECQAIPCTPLLSPQNGTMTCVQPLGSSSYKSTCQFICDEGYSLSGPERLDCTRSGRWTDSPPMCEAIKCPELFAPEQGSLDCSDTRGEFNVGSTCHFSCNNGFKLEGPNNVECTTSGRWSATPPTCKGIASLPTPGLQCPALTTPGQGTMYCRHHPGTFGFNTTCYFGCNAGFTLIGDSTLSCRPSGQWTAVTPACRAVKCSELHVNKPIAMNCSNLWGNFSYGSICSFHCLEGQLLNGSAQTACQENGHWSTTVPTCQAGPLTIQEALTYFGGAVASTIGLIMGGTLLALLRKRFRQKDDGKCPLNPHSHLGTYGVFTNAAFDPSP

SEQ ID NO: 470 - DNA, 3199 bp, Homo sapiens
gtttttctaaacagcctgacactgaggggaggcagtgagactgtaagcagtctgggttgggcagaaggcagaaaaccagcagagtcacagaggagatggccaactgccaaatagccatcttgtaccagagattccagagagtggtctttggaatttcccaactcctttgcttcagtgccctgatctctgaactaacaaaccagaaagaagtggcagcatggacttatcattacagcacaaaagcatactcatggaatatttcccgtaaatactgccagaatcgctacacagacttagtggccatccagaataaaaatgaaattgattacctcaataaggtcctaccctactacagctcctactactggattgggatccgaaagaacaataagacatggacatgggtgggaaccaaaaaggctctcaccaacgaggctgagaactgggctgataatgaacctaacaacaaaaggaacaacgaggactgcgtggagatatacatcaagagtccgtcagcccctggcaagtggaatgatgagcactgcttgaagaaaaagcacgcattgtgttacacagcctcctgccaggacatgtcctgcagcaaacaaggagagtgcctcgagaccatcgggaactacacctgctcctgttaccctggattctatgggccagaatgtgaatacgtgagagagtgtggagaacttgagctccctcaacacgtgctcatgaactgcagccaccctctgggaaacttctcttttaactcgcagtgcagcttccactgcactgacgggtaccaagtaaatgggcccagcaagctggaatgcttggcttctggaatctggacaaataagcctccacagtgtttagctgcccagtgcccacccctgaagattcctgaacgaggaaacatgatctgccttcattctgcaaaagcattccagcatcagtctagctgcagcttcagttgtgaagagggatttgcattagttggaccggaagtggtgcaatgcacagcctcgggggtatggacagccccagccccagtgtgtaaagctgtgcagtgtcagcacctggaagcccccagtgaaggaaccatggactgtgttcatccgctcactgcttttgcctatggctccagctgcaaatttgagtgccagcccggctacagagtgaggggcttggacatgctccgctgcattgactctggacactggtctgcacccttgccaacctgtgaggctatttcgtgtgagccgctggagagtcctgtccacggaagcatggattgctctccatccttgagagcgtttcagtatgacaccaactgtagcttccgctgtgctgaaggtttcatgctgagaggagccgatatagttcggtgtgataacttgggacagtggacagcaccagccccagtctgtcaagctttgcagtgccaggatctcccagttccaaatgaggcccgggtgaactgctcccaccccttcggtgcctttaggtaccagtcagtctgcagcttcacctgcaatgaaggcttgctcctggtgggagcaagtgtgctacagtgcttggctactggaaactggaattctgttcctccagaatgccaagccattccctgcacacctttgctaagccctcagaatggaacaatgacctgtgttcaacctcttggaagttccagttataaatccacatgtcaattcatctgtgacgagggatattctttgtctggaccagaaagattggattgtactcgatcgggacgctggacagactccccaccaatgtgtgaagccatcaagtgcccagaactctttgccccagagcagggcagcctggattgttctgacactcgtggagaattcaatgttggctccacctgtcatttctcttgtaacaatggctttaagctggaggggcccaataatgtggaatgcacaacttctggaagatggtcagctactccaccaacctgcaaaggcatagcatcacttcctactccagggttgcaatgtccagccctcaccactcctgggcagggaaccatgtactgtaggcatcatccgggaacctttggttttaataccacttgttactttggctgcaacgctggattcacactcataggagacagcactctcagctgcagaccttcaggacaatggacagcagtaactccagcatgcagagctgtgaaatgctcagaactacatgttaataagccaatagcgatgaactgctccaacctctggggaaacttcagttatggatcaatctgctctttccattgtctagagggccagttacttaatggctctgcacaaacagcatgccaagagaatggccactggtcaactaccgtgccaacctgccaagcaggaccattgactatccaggaagccctgacttactttggtggagcggtggcttctacaataggtctgataatgggtgggacgctcctggctttgctaagaaagcgtttcagacaaaaagatgatgggaaatgccccttgaatcctcacagccacctaggaacatatggagtttttacaaacgctgcatttgacccgagtccttaaggtttccataaacacccatgaatcaaagacatggaattaccttagattagctctggaccagcctgttggacccgctctggaccaaccctgtttcctgagtttgggattgtggtacaatctcaaattctcaacctaccaccccttcctgtcccacctcttctcttcctgtaacacaagccacagaagccaggagcaaatgtttctgcagtagtctctgtgctttgactcacctgttacttgaaataccagtgaaccaaagagactggagcatctgactcacaagaagaccagactgtggagaaataaaaatacctctttattttttgattgaaggaaggttttctccactttgttggaaagcaggtggcatctctaattggaagaaattcctgtagcatcttctggagtctccagtggttgctgttgatgaggcctcttggacctctgctctgaggcttccagagagtcctctggatggcaccagaggctgcagaaggccaagaatcaagctagaaggccacatgtcaccgtggaccttcctgccaccagtcactgtccctcaaatgacccaaagaccaatattcaaatgcgtaattaaaagaattttcccc

SEQ ID NO: 471 - protein, 1403 aa, Homo sapiens
MVSSGCRMRSLWFIIVISFLPNTEGFSRAALPFGLVRRELSCEGYSIDLRCPGSDVIMIESANYGRTDDKICDADPFQMENTDCYLPDAFKIMTQRCNNRTQCIVVTGSDVFPDPCPGTYKYLEVQYECVPYIFVCPGTLKAIVDSPCIYEAEQKAGAWCKDPLQAADKIYFMPWTPYRTDTLIEYASLEDFQNSRQTTTYKLPNRVDGTGFVVYDGAVFFNKERTRNIVKFDLRTRIKSGEAIINYANYHDTSPYRWGGKTDIDLAVDENGLWVIYATEQNNGMIVISQLNPYTLRFEATWETVYDKRAASNAFMICGVLYVVRSVYQDNESETGKNSIDYIYNTRLNRGEYVDVPFPNQYQYIAAVDYNPRDNQLYVWNNNFILRYSLEFGPPDPAQVPTTAVTITSSAELFKTIISTTSTTSQKGPMSTTVAGSQEGSKGTKPPPAVSTTKIPPITNIFPLPERFCEALDSKGIKWPQTQRGMMVERPCPKGTRGTASYLCMISTGTWNPKGPDLSNCTSHWVNQLAQKIRSGENAASLANELAKHTKGPVFAGDVSSSVRLMEQLVDILDAQLQELKPSEKDSAGRSYNKAIVDTVDNLLRPEALESWKHMNSSEQAHTATMLLDTLEEGAFVLADNLLEPTRVSMPTENIVLEVAVLSTEGQIQDFKFPLGIKGAGSSIQLSANTVKQNSRNGLAKLVFIIYRSLGQFLSTENATIKLGADFIGRNSTIAVNSHVISVSINKESSRVYLTDPVLFTLPHIDPDNYFNANCSFWNYSERTMMGYWSTQGCKLVDTNKTRTTCACSHLTNFAILMAHREIAYKDGVHELLLTVITWVGIVISLVCLAICIFTFCFFRGLQSDRNTIHKNLCINLFIAEFIFLIGIDKTKYAIACPIFAGLLHFFFLAAFAWMCLEGVQLYLMLVEVFESEYSRKKYYYVAGYLFPATVVGVSAAIDYKSYGTEKACWLHVDNYFIWSFIGPVTFIILLNIIFLVITLCKMVKHSNTLKPDSSRLENIKSWVLGAFALLCLLGLTWSFGLLFINEETIVMAYLFTIFNAFQGVFIFIFHCALQKKVRKEYGKCFRHSYCCGGLPTESPHSSVKASTTRTSARYSSGTQSRIRRMWNDTVRKQSESSFISGDINSTSTLNQGHSLNNARDTSAMDTLPLNGNFNNSYSLHKGDYNDSVQVVDCGLSLNDTAFEKMIISELVHNNLRGSSKTHNLELTLPVKPVIGGSSSEDDAIVADASSLMHSDNPGLELHHKELEAPLIPQRTHSLLYQPQKKVKSEGTDSYVSQLTAEAEDHLQSPNRDSLYTSMPNLRDSPYPESSPDMEEDLSPSRRSENEDIYYKSMPNLGAGHQLQMCYQISRGNSDGYIIPINKEGCIPEGDVREGQMQLVTSL

SEQ ID NO: 472 - DNA, 5479 bp, Homo sapiens
cggcgaacagacgttctttctcctccatgcagttacacaaaaggagggctacggaaactaaaagtttcggggcctctggctcggtgtgtggagaaaagagaaaacctggagacgggatatgaagatcaatgatgcagactgatggtcttgatgaagctgggcatttataactagattcattaaggaatacaaagaaaatacttaaagggatcaataatggtgtcttctggttgcagaatgcgaagtctgtggtttatcattgtaatcagcttcttaccaaatacagaaggtttcagcagagcagctttaccatttgggctggtgaggcgagaattatcctgtgaaggttattctatagatctgcgatgcccgggcagtgatgtcatcatgattgagagcgctaactatggtcggacggatgacaagatttgtgatgctgacccatttcagatggagaatacagactgctacctccccgatgccttcaaaattatgactcaaaggtgcaacaatcgaacacagtgtatagtagttactgggtcagatgtgtttcctgatccatgtcctggaacatacaaataccttgaagtccaatatgaatgtgtcccttacatttttgtgtgtcctgggaccttgaaagcaattgtggactcaccatgtatatatgaagctgaacaaaaggcgggtgcttggtgcaaggaccctcttcaggctgcagataaaatttatttcatgccctggactccctatcgtaccgatactttaatagaatatgcttctttagaagatttccaaaatagtcgccaaacaacaacatataaacttccaaatcgagtagatggtactggatttgtggtgtatgatggtgctgtcttctttaacaaagaaagaacgaggaatattgtgaaatttgacttgaggactagaattaagagtggcgaggccataattaactatgccaactaccatgatacctcaccatacagatggggaggaaagactgatatcgacctagcagttgatgaaaatggtttatgggtcatttacgccactgaacagaacaatggaatgatagttattagccagctgaatccatacactcttcgatttgaagcaacgtgggagactgtatacgacaaacgtgccgcatcaaatgcttttatgatatgcggagtcctctatgtggttaggtcagtttatcaagacaatgaaagtgaaacaggcaagaactcaattgattacatttataatacccgattaaaccgaggagaatatgtagacgttcccttccccaaccagtatcagtatattgctgcagtggattacaatccaagagataaccaactttacgtgtggaacaataacttcattttacgatattctctggagtttggtccacctgatcctgcccaagtgcctaccacagctgtgacaataacttcttcagctgagctgttcaaaaccataatatcaaccacaagcactacttcacagaaaggccccatgagcacaactgtagctggatcacaggaaggaagcaaagggacaaaaccacctccagcagtttctacaaccaaaattccacctataacaaatatttttcccctgccagagagattctgtgaagcattagactccaaggggataaagtggcctcagacacaaaggggaatgatggttgaacgaccatgccctaagggaacaagaggaactgcctcatatctctgcatgatttccactggaacatggaaccctaagggccccgatcttagcaactgtacctcacactgggtgaatcagctggctcagaagatcagaagcggagaaaatgctgctagtcttgccaatgaactggctaaacataccaaagggccagtgtttgctggggatgtaagttcttcagtgagattgatggagcagttggtggacatccttgatgcacagctgcaggaactgaaacctagtgaaaaagattcagctggacggagttataacaaggcaattgttgacacagtggacaaccttctgagacctgaagctttggaatcatggaaacatatgaattcttctgaacaagcacatactgcaacaatgttactcgatacattggaagaaggagcttttgtcctagctgacaatcttttagaaccaacaagggtctcaatgcccacagaaaatattgtcctggaagttgccgtactcagtacagaaggacagatccaagactttaaatttcctctgggcatcaaaggagcaggcagctcaatccaactgtccgcaaataccgtcaaacagaacagcaggaatgggcttgcaaagttggtgttcatcatttaccggagcctgggacagttccttagtacagaaaatgcaaccattaaactgggtgctgattttattggtcgtaatagcaccattgcagtgaactctcacgtcatttcagtttcaatcaataaagagtccagccgagtatacctgactgatcctgtgctttttaccctgccacacattgatcctgacaattatttcaatgcaaactgctccttctggaactactcagagagaactatgatgggatattggtctacccagggctgcaagctggttgacactaataaaactcgaacaacgtgtgcatgcagccacctaaccaattttgcaattctcatggcccacagggaaattgcatataaagatggcgttcatgaattacttcttacagtcatcacctgggtgggaattgtcatttcccttgtttgcctggctatctgcatcttcaccttctgctttttccgtggcctacagagtgaccgaaatactattcacaagaacctttgtatcaaccttttcattgctgaatttattttcctaataggcattgataagacaaaatatgcgattgcatgcccaatatttgcaggacttctacactttttctttttggcagcttttgcttggatgtgcctagaaggtgtgcagctctacctaatgttagttgaagtttttgaaagtgaatattcaaggaaaaaatattactatgttgctggttacttgtttcctgccacagtggttggagtttcagctgctattgactataagagctatggaacagaaaaagcttgctggcttcatgttgataactactttatatggagcttcattggacctgttaccttcattattctgctaaatattatcttcttggtgatcacattgtgcaaaatggtgaagcattcaaacactttgaaaccagattctagcaggttggaaaacattaagtcttgggtgcttggcgctttcgctcttctgtgtcttcttggcctcacctggtcctttgggttgctttttattaatgaggagactattgtgatggcatatctcttcactatatttaatgctttccagggagtgttcattttcatctttcactgtgctctccaaaagaaagtacgaaaagaatatggcaagtgcttcagacactcatactgctgtggaggcctcccaactgagagtccccacagttcagtgaaggcatcaaccaccagaaccagtgctcgctattcctctggcacacagagtcgtataagaagaatgtggaatgatactgtgagaaaacaatcagaatcttcttttatctcaggtgacatcaatagcacttcaacacttaatcaaggacattcactgaacaatgccagggatacaagtgccatggatactctaccgctaaatggtaattttaacaacagctactcgctgcacaagggtgactataatgacagcgtgcaagttgtggactgtggactaagtctgaatgatactgcttttgagaaaatgatcatttcagaattagtgcacaacaacttacggggcagcagcaagactcacaacctcgagctcacgctaccagtcaaacctgtgattggaggtagcagcagtgaagatgatgctattgtggcagatgcttcatctttaatgcacagcgacaacccagggctggagctccatcacaaagaactcgaggcaccacttattcctcagcggactcactcccttctgtaccaaccccagaagaaagtgaagtccgagggaactgacagctatgtctcccaactgacagcagaggctgaagatcacctacagtcccccaacagagactctctttatacaagcatgcccaatcttagagactctccctatccggagagcagccctgacatggaagaagacctctctccctccaggaggagtgagaatgaggacatttactataaaagcatgccaaatcttggagctggccatcagcttcagatgtgctaccagatcagcaggggcaatagtgatggttatataatccccattaacaaagaagggtgtattccagaaggagatgttagagaaggacaaatgcagctggttacaagtctttaatcatacagctaaggaattccaagggccacatgcgagtattaataaataaagacaccattggcctgacgcagctccctcaaactctgcttgaagagatgactcttgacctgtggttctctggtgtaaaaaagatgactgaaccttgcagttctgtgaatttttataaaacatacaaaaactttgtatatacacagagtatactaaagtgaattatttgttacaaagaaaagagatgccagccaggtattttaagattctgctgctgtttagagaaattgtgaaacaagcaaaacaaaactttccagccattttactgcagcagtctgtgaactaaatttgtaaatatggctgcaccatttttgtaggcctgcattgtattatatacaagacgtaggctttaaaatcctgtgggacaaatttactgtaccttactattcctgacaagacttggaaaagcaggagagatattctgcatcagtttgcagttcactgcaaatcttttacattaaggcaaagattgaaaacatgcttaaccactagcaatcaagccacaggccttatttcatatgtttcctcaactgtacaatgaactattctcatgaaaaatggctaaagaaattatattttgttctattgctagggtaaaataaatacatttgtgtccaactgaaatataattgtcattaaaataattttaaagagtgaagaaaatattgtgaaaagctcttggttgcacatgttatgaaatgttttttcttacactttgtcatggtaagttctactcattttcacttcttttccactgtatacagtgttctgctttgacaaagttagtctttattacttacatttaaatttcttattgccaaaagaacgtgttttatggggagaaacaaactctttgaagccagttatgtcatgccttgcacaaaagtgatgaaatctagaaaagattgtgtgtcacccctgtttattcttgaacagagggcaaagagggcactgggcacttctcacaaactttctagtgaacaaaaggtgcctattctttttt

SEQ ID NO: 473 - protein, 377 aa, Homo sapiens
MCEEEDSTALVCDNGSGLCKAGFAGDDAPRAVFPSIVGRPRHQGVMVGMGQKDSYVGDEAQSKRGILTLKYPIEHGIITNWDDMEKIWHHSFYNELRVAPEEHPTLLTEAPLNPKANREKMTQIMFETFNVPAMYVAIQAVLSLYASGRTTGIVLDSGDGVTHNVPIYEGYALPHAIMRLDLAGRDLTDYLMKILTERGYSFVTTAEREIVRDIKEKLCYVALDFENEMATAASSSSLEKSYELPDGQVITIGNERFRCPETLFQPSFIGMESAGIHETTYNSIMKCDIDIRKDLYANNVLSGGTTMYPGIADRMQKEITALAPSTMKIKIIAPPERKYSVWIGGSILASLSTFQQMWISKQEYDEAGPSIVHRKCF

SEQ ID NO: 474 - DNA, 1330 bp, Homo sapiens
gcagcccagccaagcactgtcaggaatcctgtgaagcagctccagctatgtgtgaagaagaggacagcactgccttggtgtgtgacaatggctctgggctctgtaaggccggctttgctggggacgatgctcccagggctgttttcccatccattgtgggacgtcccagacatcagggggtgatggtgggaatgggacaaaaagacagctacgtgggtgacgaagcacagagcaaaagaggaatcctgaccctgaagtacccgatagaacatggcatcatcaccaactgggacgacatggaaaagatctggcaccactctttctacaatgagcttcgtgttgcccctgaagagcatcccaccctgctcacggaggcacccctgaaccccaaggccaaccgggagaaaatgactcaaattatgtttgagactttcaatgtcccagccatgtatgtggctatccaggcggtgctgtctctctatgcctctggacgcacaactggcatcgtgctggactctggagatggtgtcacccacaatgtccccatctatgagggctatgccttgccccatgccatcatgcgtctggatctggctggccgagatctcactgactacctcatgaagatcctgactgagcgtggctattccttcgttactactgctgagcgtgagattgtccgggacatcaaggagaaactgtgttatgtagctctggactttgaaaatgagatggccactgccgcatcctcatcctcccttgagaagagttacgagttgcctgatgggcaagtgatcaccatcggaaatgaacgtttccgctgcccagagaccctgttccagccatccttcatcgggatggagtctgctggcatccatgaaaccacctacaacagcatcatgaagtgtgatattgacatcaggaaggacctctatgctaacaatgtcctatcagggggcaccactatgtaccctggcattgccgaccgaatgcagaaggagatcacggccctagcacccagcaccatgaagatcaagatcattgcccctccggagcgcaaatactctgtctggatcggtggctccatcctggcctctctgtccaccttccagcagatgtggatcagcaaacaggaatacgatgaagccgggccttccattgtccaccgcaaatgcttctaaaacactttcctgctcctctctgtctctagcacacaactgtgaatgtcctgtggaattatgccttcagttcttttccaaatcattcctagccaaagctctgactcgttacctatgtgttttttaataaatctgaaataggctactggtaa

SEQ ID NO: 475 - protein, 760 aa, Homo sapiens
MKTWVKIVFGVATSAVLALLVMCIVLRPSRVHNSEENTMRALTLKDILNGTFSYKTFFPNWISGQEYLHQSADNNIVLYNIETGQSYTILSNRTMKSVNASNYGLSPDRQFVYLESDYSKLWRYSYTATYYIYDLSNGEFVRGNELPRPIQYLCWSPVGSKLAYVYQNNIYLKQRPGDPPFQITFNGRENKIFNGIPDWVYEEEMLATKYALWWSPNGKFLAYAEFNDTDIPVIAYSYYGDEQYPRTINIPYPKAGAKNPVVRIFIIDTTYPAYVGPQEVPVPAMIASSDYYFSWLTWVTDERVCLQWLKRVQNVSVLSICDFREDWQTWDCPKTQEHIEESRTGWAGGFFVSTPVFSYDAISYYKIFSDKDGYKHIHYIKDTVENAIQITSGKWEAINIFRVTQDSLFYSSNEFEEYPGRRNIYRISIGSYPPSKKCVTCHLRKERCQYYTASFSDYAKYYALVCYGPGIPISTLHDGRTDQEIKILEENKELENALKNIQLPKEEIKKLEVDEITLWYKMILPPQFDRSKKYPLLIQVYGGPCSQSVRSVFAVNWISYLASKEGMVIALVDGRGTAFQGDKLLYAVYRKLGVYEVEDQITAVRKFIEMGFIDEKRIAIWGWSYGGYVSSLALASGTGLFKCGIAVAPVSSWEYYASVYTERFMGLPTKDDNLEHYKNSTVMARAEYFRNVDYLLIHGTADDNVHFQNSAQIAKALVNAQVDFQAMWYSDQNHGLSGLSTNHLYTHMTHFLKQCFSLSD

SEQ ID NO: 476 - DNA, 2788 bp, Homo sapiens
aagaacgcccccaaaatctgtttctaattttacagaaatcttttgaaacttggcacggtattcaaaagtccgtggaaagaaaaaaaccttgtcctggcttcagcttccaactacaaagacagacttggtccttttcaacggttttcacagatccagtgacccacgctctgaagacagaattagctaactttcaaaaacatctggaaaaatgaagacttgggtaaaaatcgtatttggagttgccacctctgctgtgcttgccttattggtgatgtgcattgtcttacgcccttcaagagttcataactctgaagaaaatacaatgagagcactcacactgaaggatattttaaatggaacattttcttataaaacattttttccaaactggatttcaggacaagaatatcttcatcaatctgcagataacaatatagtactttataatattgaaacaggacaatcatataccattttgagtaatagaaccatgaaaagtgtgaatgcttcaaattacggcttatcacctgatcggcaatttgtatatctagaaagtgattattcaaagctttggagatactcttacacagcaacatattacatctatgaccttagcaatggagaatttgtaagaggaaatgagcttcctcgtccaattcagtatttatgctggtcgcctgttgggagtaaattagcatatgtctatcaaaacaatatctatttgaaacaaagaccaggagatccaccttttcaaataacatttaatggaagagaaaataaaatatttaatggaatcccagactgggtttatgaagaggaaatgcttgctacaaaatatgctctctggtggtctcctaatggaaaatttttggcatatgcggaatttaatgatacggatataccagttattgcctattcctattatggcgatgaacaatatcctagaacaataaatattccatacccaaaggctggagctaagaatcccgttgttcggatatttattatcgataccacttaccctgcgtatgtaggtccccaggaagtgcctgttccagcaatgatagcctcaagtgattattatttcagttggctcacgtgggttactgatgaacgagtatgtttgcagtggctaaaaagagtccagaatgtttcggtcctgtctatatgtgacttcagggaagactggcagacatgggattgtccaaagacccaggagcatatagaagaaagcagaactggatgggctggtggattctttgtttcaacaccagttttcagctatgatgccatttcgtactacaaaatatttagtgacaaggatggctacaaacatattcactatatcaaagacactgtggaaaatgctattcaaattacaagtggcaagtgggaggccataaatatattcagagtaacacaggattcactgttttattctagcaatgaatttgaagaataccctggaagaagaaacatctacagaattagcattggaagctatcctccaagcaagaagtgtgttacttgccatctaaggaaagaaaggtgccaatattacacagcaagtttcagcgactacgccaagtactatgcacttgtctgctacggcccaggcatccccatttccacccttcatgatggacgcactgatcaagaaattaaaatcctggaagaaaacaaggaattggaaaatgctttgaaaaatatccagctgcctaaagaggaaattaagaaacttgaagtagatgaaattactttatggtacaagatgattcttcctcctcaatttgacagatcaaagaagtatcccttgctaattcaagtgtatggtggtccctgcagtcagagtgtaaggtctgtatttgctgttaattggatatcttatcttgcaagtaaggaagggatggtcattgccttggtggatggtcgaggaacagctttccaaggtgacaaactcctctatgcagtgtatcgaaagctgggtgtttatgaagttgaagaccagattacagctgtcagaaaattcatagaaatgggtttcattgatgaaaaaagaatagccatatggggctggtcctatggaggatacgtttcatcactggcccttgcatctggaactggtcttttcaaatgtggtatagcagtggctccagtctccagctgggaatattacgcgtctgtctacacagagagattcatgggtctcccaacaaaggatgataatcttgagcactataagaattcaactgtgatggcaagagcagaatatttcagaaatgtagactatcttctcatccacggaacagcagatgataatgtgcactttcaaaactcagcacagattgctaaagctctggttaatgcacaagtggatttccaggcaatgtggtactctgaccagaaccacggcttatccggcctgtccacgaaccacttatacacccacatgacccacttcctaaagcagtgtttctctttgtcagactaaaaacgatgcagatgcaagcctgtatcagaatctgaaaaccttatataaacccctcagacagtttgcttattttattttttatgttgtaaaatgctagtataaacaaacaaattaatgttgttctaaaggctgttaaaaaaaagatgaggactcagaagttcaagctaaatattgtttacattttctggtactctgtgaaagaagagaaaagggagtcatgcattttgctttggacacagtgttttatcacctgttcatttgaagaaaaataataaagtcagaagttcaaaaaaaaaa

SEQ ID NO: 477 - protein, 241 aa, Homo sapiens
MRTADGGEPAGASSPAGRVDGGLQMGSERMEMRKRQMPAAQDTPGAAPGQPGAGSRGSNACCFCWCCCCSCSCLTVRNQEDQRPTIASHELRADLPTWEESPAPTLEEVNAWAQSFDKLMVTPAGRNAFREFLRTEFSEENMLFWMACEELKKEANKNIIEEKARIIYEDYISILSPKEVSLDSRVREVINRNMVEPSQHIFDDAQLQIYTLMHRDSYPRFMNSAVYKDLLQSLSEKSIEA

SEQ ID NO: 478 - DNA, 1596 bp, Homo sapiens
ccgcgggacgcatgcgcacggcggacggaggcgagccggccggggcttcctccccggccggcagggtggacggtgggctccagatgggatcagagcggatggagatgcggaagcggcagatgcccgccgcccaggacacaccaggcgccgccccaggccagcccggagcggggagtcgcgggtccaacgcatgctgcttctgctggtgctgctgttgtagctgctcgtgtctcactgttagaaaccaggaagatcagaggcccacaatagcttcccacgaactcagagcagatcttccaacctgggaagaaagccctgctcctactctggaagaagtcaacgcctgggctcagtcatttgacaaattaatggtcactccagcaggaaggaatgcattccgtgaattcctccgaacagaattcagtgaggaaaatatgctcttctggatggcctgtgaggaactgaaaaaggaagctaataaaaacattattgaagagaaagcaaggataatctatgaagactacatttctatactttctcctaaggaggtgagcttagactcccgggtgagagaagtgatcaacagaaacatggtggagccatcccaacacatattcgatgatgctcaacttcagatttacaccctgatgcacagagactcatatcctcgattcatgaactctgctgtctataaggacttgcttcagtccttatcggagaaatctattgaagcataggatttttcaaatatatttattattaataaaataataaaagaattcatgggctacaactagcacagggaatttagaggttgtagcatcttctgctggagtaatactcaggctattctaataacagatgattccttcaacagactgctatatattcaccatgtaaactgcagccacctttagtgatacttttaaaaaaaaaaataaagggatatggctgttgtagaaagatagcgtatttgcatttacaataacagtagcatgttgtcagtggccaaggctacacagaaggctccctgctgcccggagcaggtacatccacagagcaaagggaaccacttttattttgcatgagtttggtaactgattactctcccctcaaagaaaagacattcaggtgtttctcaacgacatcttctgtccagcaagctcggtttgaatacgtcacttaccagtgccattgcaggacccaaattcacagttcataaaagatgtgaccactacatgtaaaaatagcattctacttgatcttacagtatgtatgtatgtatgtatggagacatatgtgtgcgtgtggatgtctacatggttaatggaaagcactgtgctctgaagtggatcagtctcaagtgtctggtaacagcagcaatgcttagaaaattcttttgttgaaaagagttactgttattatcagaatttgccaacctaaagaatgaatttttaaattcataacttggtcatgttcacaacaaaactgtcaaataagcatatttccatttttattactgaaagaaatatgggcattttcattctttaaagaaataaagcacaagaattttatctcaaaaaaaaaaaaaaaaaa

SEQ ID NO: 479 - protein, 579 aa, Homo sapiens
MNKLYIGNLSENAAPSDLESIFKDAKIPVSGPFLVKTGYAFVDCPDESWALKAIEALSGKIELHGKPIEVEHSVPKRQRIRKLQIRNIPPHLQWEVLDSLLVQYGVVESCEQVNTDSETAVVNVTYSSKDQARQALDKLNGFQLENFTLKVAYIPDEMAAQQNPLQQPRGRRGLGQRGSSRQGSPGSVSKQKPCDLPLRLLVPTQFVGAIIGKEGATIRNITKQTQSKIDVHRKENAGAAEKSITILSTPEGTSAACKSILEIMHKEAQDIKFTEEIPLKILAHNNFVGRLIGKEGRNLKKIEQDTDTKITISPLQELTLYNPERTITVKGNVETCAKAEEEIMKKIRESYENDIASMNLQAHLIPGLNLNALGLFPPTSGMPPPTSGPPSAMTPPYPQFEQSETETVHQFIPALSVGAIIGKQGQHIKQLSRFAGASIKIAPAEAPDAKVRMVIITGPPEAQFKAQGRIYGKIKEENFVSPKEEVKLEAHIRVPSFAAGRVIGKGGKTVNELQNLSSAEVVVPRDQTPDENDQVVVKITGHFYACQVAQRKIQEILTQVKQHQQQKALQSGPPQSRRK

SEQ ID NO: 480 - DNA, 4181 bp, Homo sapiens
  misc_feature (3347)..(3347): n = a, c, g, or t
  misc_feature (3502)..(3502): n = a, c, g, or t
  misc_feature (3506)..(3506): n = a, c, g, or t
  misc_feature (3520)..(3520): n = a, c, g, or t
  misc_feature (3538)..(3538): n = a, c, g, or t
  misc_feature (3549)..(3549): n = a, c, g, or t
  misc_feature (3646)..(3646): n = a, c, g, or t
  misc_feature (3940)..(3940): n = a, c, g, or t
  misc_feature (3968)..(3968): n = a, c, g, or t
  misc_feature (3974)..(3974): n = a, c, g, or t
  misc_feature (4036)..(4036): n = a, c, g, or t
  misc_feature (4056)..(4056): n = a, c, g, or t
  misc_feature (4062)..(4062): n = a, c, g, or t
  misc_feature (4080)..(4080): n = a, c, g, or t
  misc_feature (4088)..(4088): n = a, c, g, or t
  misc_feature (4115)..(4115): n = a, c, g, or t
ggtggatgcgtttgggttgtagctaggctttttcttttctttctcttttaaaacacatctagacaaggaaaaaacaagcctcggatctgatttttcactcctcgttcttgtgcttggttcttactgtgtttgtgtattttaaaggcgagaagacgaggggaacaaaaccagctggatccatccatcaccgtgggtggttttaatttttcgttttttctcgttatttttttttaaacaaccactcttcacaatgaacaaactgtatatcggaaacctcagcgagaacgccgccccctcggacctagaaagtatcttcaaggacgccaagatcccggtgtcgggacccttcctggtgaagactggctacgcgttcgtggactgcccggacgagagctgggccctcaaggccatcgaggcgctttcaggtaaaatagaactgcacgggaaacccatagaagttgagcactcggtcccaaaaaggcaaaggattcggaaacttcagatacgaaatatcccgcctcatttacagtgggaggtgctggatagtttactagtccagtatggagtggtggagagctgtgagcaagtgaacactgactcggaaactgcagttgtaaatgtaacctattccagtaaggaccaagctagacaagcactagacaaactgaatggatttcagttagagaatttcaccttgaaagtagcctatatccctgatgaaatggccgcccagcaaaaccccttgcagcagccccgaggtcgccgggggcttgggcagaggggctcctcaaggcaggggtctccaggatccgtatccaagcagaaaccatgtgatttgcctctgcgcctgctggttcccacccaatttgttggagccatcataggaaaagaaggtgccaccattcggaacatcaccaaacagacccagtctaaaatcgatgtccaccgtaaagaaaatgcgggggctgctgagaagtcgattactatcctctctactcctgaaggcacctctgcggcttgtaagtctattctggagattatgcataaggaagctcaagatataaaattcacagaagagatccccttgaagattttagctcataataactttgttggacgtcttattggtaaagaaggaagaaatcttaaaaaaattgagcaagacacagacactaaaatcacgatatctccattgcaggaattgacgctgtataatccagaacgcactattacagttaaaggcaatgttgagacatgtgccaaagctgaggaggagatcatgaagaaaatcagggagtcttatgaaaatgatattgcttctatgaatcttcaagcacatttaattcctggattaaatctgaacgccttgggtctgttcccacccacttcagggatgccacctcccacctcagggcccccttcagccatgactcctccctacccgcagtttgagcaatcagaaacggagactgttcatcagtttatcccagctctatcagtcggtgccatcatcggcaagcagggccagcacatcaagcagctttctcgctttgctggagcttcaattaagattgctccagcggaagcaccagatgctaaagtgaggatggtgattatcactggaccaccagaggctcagttcaaggctcagggaagaatttatggaaaaattaaagaagaaaactttgttagtcctaaagaagaggtgaaacttgaagctcatatcagagtgccatcctttgctgctggcagagttattggaaaaggaggcaaaacggtgaatgaacttcagaatttgtcaagtgcagaagttgttgtccctcgtgaccagacacctgatgagaatgaccaagtggttgtcaaaataactggtcacttctatgcttgccaggttgcccagagaaaaattcaggaaattctgactcaggtaaagcagcaccaacaacagaaggctctgcaaagtggaccacctcagtcaagacggaagtaaaggctcaggaaacagcccaccacagaggcagatgccaaaccaaagacagattgcttaaccaacagatgggcgctgaccccctatccagaatcacatgcacaagtttttacctagccagttgtttctgaggaccaggcaacttttgaactcctgtctctgtgagaatgtatactttatgctctctgaaatgtatgacacccagctttaaaacaaacaaacaaacaaacaaaaaaagggtgggggagggagggaaagagaagagctctgcacttccctttgttgtagtctcacagtataacagatattctaattcttcttaatattcccccataatgccagaaattggcttaatgatgctttcactaaattcatcaaatagattgctcctaaatccaattgttaaaattggatcagaataattatcacaggaacttaaatgttaagccattagcatagaaaaactgttctcagttttatttttacctaacactaacatgagtaacctaagggaagtgctgaatggtgttggcaggggtattaaacgtgcatttttactcaactacctcaggtattcagtaatacaatgaaaagcaaaattgttccttttttttgaaaattttatatactttataatgatagaagtccaaccgttttttaaaaaataaatttaaaatttaacagcaatcagctaacaggcaaattaagatttttacttctggctggtgacagtaaagctggaaaattaatttcagggttttttgaggcttttgacacagttattagttaaatcaaatgttcaaaaatacggagcagtgcctagtatctggagagcagcactaccatttattctttcatttatagttgggaaagtttttgacggtactaacaaagtggtcgcaggagattttggaacggctggtttaaatggcttcaggagacttcagttttttgtttagctacatgattgaatgcataataaatgctttgtgcttctgactatcaatacctaaagaaagtgcatcagtgaagagatgcaagactttcaactgactggcaaaaagcaagctttagcttgtcttataggatgcttagtttgccactacacttcagaccaatgggacagtcatagatggtgtgacagtgtttaaacgcaacaaaaggctacatttccatggggccagcactgtcatgagcctcactaagctattttgaagatttttaagcactgataaattaaaaaaaaaaaaaaaaaattagactccaccttaagtagtaaagtataacaggatttctgtatactgtgcaatcagttctttgaaaaaaaagtcaaaagatagagaatacaagaaaagttttngggatataatttgaatgactgtgaaaacatatgacctttgataacgaactcatttgctcactccttgacagcaaagcccagtacgtacaattgtgttgggtgtgggtggtctccaaggccacgctgctctctgaattgattttttgagttttggnttgnaagatgatcacagncatgttacactgatcttnaaggacatatnttataaccctttaaaaaaaaaatcccctgcctcattcttatttcgagatgaatttcgatacagactagatgtctttctgaagatcaattagacattntgaaaatgatttaaagtgttttccttaatgttctctgaaaacaagtttcttttgtagttttaaccaaaaaagtgccctttttgtcactggtttctcctagcattcatgatttttttttcacacaatgaattaaaattgctaaaatcatggactggctttctggttggatttcaggtaagatgtgtttaaggccagagcttttctcagtatttgatttttttccccaatatttgattttttaaaaatatacacataggagctgcatttaaaacctgctggtttaaattctgtcanatttcacttctagccttttagtatggcnaatcanaatttacttttacttaagcatttgtaatttggagtatctggtactagctaagaaataattcnataattgagttttgtactcnccaaanatgggtcattcctcatgnataatgtncccccaatgcagcttcattttccaganaccttgacgcaggataaattttttcatcatttaggtccccaaaaaaaaaaaaaaaaaaaaaaaaaa

SEQ ID NO: 481 - DNA, 845 bp, Homo sapiens
  misc_feature (1)..(12): n = a, c, g, or t
  misc_feature (15)..(15): n = a, c, g, or t
  misc_feature (96)..(96): n = a, c, g, or t
  misc_feature (161)..(161): n = a, c, g, or t
  misc_feature (374)..(374): n = a, c, g, or t
  misc_feature (406)..(406): n = a, c, g, or t
  misc_feature (458)..(458): n = a, c, g, or t
  misc_feature (472)..(473): n = a, c, g, or t
  misc_feature (483)..(483): n = a, c, g, or t
  misc_feature (486)..(486): n = a, c, g, or t
  misc_feature (495)..(495): n = a, c, g, or t
  misc_feature (506)..(506): n = a, c, g, or t
  misc_feature (516)..(516): n = a, c, g, or t
  misc_feature (526)..(526): n = a, c, g, or t
  misc_feature (545)..(545): n = a, c, g, or t
  misc_feature (551)..(551): n = a, c, g, or t
  misc_feature (554)..(554): n = a, c, g, or t
  misc_feature (561)..(561): n = a, c, g, or t
  misc_feature (564)..(564): n = a, c, g, or t
  misc_feature (567)..(567): n = a, c, g, or t
  misc_feature (572)..(572): n = a, c, g, or t
  misc_feature (583)..(583): n = a, c, g, or t
  misc_feature (592)..(593): n = a, c, g, or t
  misc_feature (599)..(599): n = a, c, g, or t
  misc_feature (609)..(609): n = a, c, g, or t
  misc_feature (616)..(616): n = a, c, g, or t
  misc_feature (636)..(636): n = a, c, g, or t
  misc_feature (638)..(639): n = a, c, g, or t
  misc_feature (643)..(644): n = a, c, g, or t
  misc_feature (649)..(649): n = a, c, g, or t
  misc_feature (658)..(662): n = a, c, g, or t
  misc_feature (665)..(665): n = a, c, g, or t
  misc_feature (667)..(667): n = a, c, g, or t
  misc_feature (670)..(670): n = a, c, g, or t
  misc_feature (674)..(674): n = a, c, g, or t
  misc_feature (677)..(680): n = a, c, g, or t
  misc_feature (683)..(683): n = a, c, g, or t
  misc_feature (687)..(699): n = a, c, g, or t
  misc_feature (702)..(727): n = a, c, g, or t
  misc_feature (729)..(733): n = a, c, g, or t
  misc_feature (735)..(746): n = a, c, g, or t
  misc_feature (748)..(758): n = a, c, g, or t
  misc_feature (760)..(760): n = a, c, g, or t
  misc_feature (763)..(764): n = a, c, g, or t
  misc_feature (766)..(774): n = a, c, g, or t
  misc_feature (776)..(778): n = a, c, g, or t
  misc_feature (780)..(781): n = a, c, g, or t
  misc_feature (784)..(784): n = a, c, g, or t
  misc_feature (786)..(791): n = a, c, g, or t
  misc_feature (794)..(794): n = a, c, g, or t
  misc_feature (796)..(796): n = a, c, g, or t
  misc_feature (798)..(800): n = a, c, g, or t
  misc_feature (802)..(804): n = a, c, g, or t
  misc_feature (806)..(806): n = a, c, g, or t
  misc_feature (808)..(809): n = a, c, g, or t
  misc_feature (811)..(822): n = a, c, g, or t
  misc_feature (824)..(824): n = a, c, g, or t
  misc_feature (826)..(828): n = a, c, g, or t
  misc_feature (830)..(831): n = a, c, g, or t
  misc_feature (834)..(834): n = a, c, g, or t
  misc_feature (836)..(838): n = a, c, g, or t
  misc_feature (840)..(840): n = a, c, g, or t
  misc_feature (842)..(843): n = a, c, g, or t
nnnnnnnnnnnnttntttctcaggagaaggcaggtggttccgatttccaaattagggttctcctcatctcctaccaagaaaagcaaaagcaccgangatggggcagagctggaagaacaaaaacttcaagaagaaacaatcacgttttttgatgcccgagnaaagtttctcccctgaagagaaggaagagggtgaactgatcgggcctgtgggcactgggctggactccagagtgatggtgacatccgcggcaagaacagagttaatcctgcccgagcaggacagaaaagctgacgatgaaagcaaagggtcaggcctgggaccaaatgaaggctgagaggtatggctcatcggtacaagagagatgcaaaaanctaagttggaaagtaaaggctacacacacatntggagcaccccatcccacagcacattacatccacctcacttcacagaacggngaacagagcaggannttgaccagancanctttgtcancatcacacagnccccctaaantggaaccaangctcccagctccctcaaangctttnggntgcaaanganggnacccngactccacaangacaacagnnttcaanttggctttancaggtgnctcaaacgggggggggggtntnnccannttgtnctttcaaannnnnttncnccncccnctnnnnttncaannnnnnnnnnnnnctnnnnnnnnnnnnnnnnnnnnnnnnnncnnnnncnnnnnnnnnnnncnnnnnnnnnnncnccnncnnnnnnnnncnnncnnccncnnnnnntcncncnnncnnncncnncnnnnnnnnnnnncncnnncnnccncnnncncnntt

SEQ ID NO: 482 - protein, 227 aa, Homo sapiens
MGGKLSKKKKGYNVNDEKAKEKDKKAEGAATEEEGTPKESEPQAPAEPAEAKEGKEKPDQDAEGKAEEKEGEKDAAAAKEEAPKAEPEKTEGAAEAKAEPPKAPEQEQAAPGPLRGGEAPKAAEAAAGPRPRAAPAAGEEPSKEEGEPKKTEAPAAPAAQETKSDGAPASDSKPGSSEAAPSSKETPAATEAPSSTPKAQGPAASAEEPKPVEAPAANSDQTVTVKE

SEQ ID NO: 483 - DNA, 1486 bp, Homo sapiens
gaattcggcacgagctcaggggctgcataggcacccagagccgaactccaagatgggaggcaagctcagcaagaagaagaagggctacaatgtgaacgacgagaaagccaaggagaaagacaagaaggccgagggcgcggcgacggaagaggaggggaccccgaaggagagtgagccccaggcgcccgcagagcccgccgaggccaaggagggcaaggagaagcccgaccaggacgccgagggcaaggccgaggagaaggagggcgagaaggacgcggcggctgccaaggaggaggccccgaaggcggagcccgagaagacggagggcgcggcagaggccaaggctgagcccccgaaggcgcccgagcaggagcaggcggcccccggcccgctgcggggcggcgaggcccccaaagctgctgaggccgccgccggcccccggccgagagcggcccctgccgccggggaggagcccagcaaggaggaaggggaacccaaaaagactgaggcgcccgcagctcctgccgcccaggagaccaaaagtgacggggccccagcttcagactcaaaacccggcagctcggaggctgccccctcttccaaggagacccccgcagccacggaagcgcctagttccacacccaaggcccagggccccgcagcctctgcagaagagcccaagccggtggaggccccggcagctaattccgaccaaaccgtaaccgtgaaagagtgacaaggacagcctataggaaaaacaataccacttaaaacaatctcctctctctctctctctctctctctatctctctctctatctcctctctctctctcctctcctatctctcctctctctctctcctatactaacttgtttcaaattggaagtaatgatatgtattgcccaaggaaaaatacaggatgttgtcccatcaagggagggagggggtgggagaatccaaatagtatttttgtggggaaatatctaatataccttcagtcaactttaccaagaagtcctggatttccaagatccgcgtctgaaagtgcagtacatcgtttgtacctgaaactgccgccacatgcactcctccaccgctgagagttgaatagcttttcttctgcaatgggagttgggagtgatgcgtttgattctgcccacagggcctgtgccaaggcaatcagatctttatgagagcagtattttctgtgttttctttttaatttacagcctttcttattttgatatttttttaatgttgtggatgaatgccagctttcagacagagcccacttagcttgtccacatggatctcaatgccaatcctccattcttcctctccagatatttttgggagtgacaaacattctctcatcctacttagcctacctagatttctcatgacgagttaatgcatgtccgtggttgggtgcacctgtagttctgtttattggtcagtggaaatgaaaaaaaaaaaaaaaaaaa

SEQ ID NO: 484 - protein, 140 aa, Homo sapiens
MAGWQSYVDNLMCDGCCQEAAIVGYCDAKYVWAATAGGVFQSITPIEIDMIVGKDREGFFTNGLTLGAKKCSVIRDSLYVDGDCTMDIRTKSQGGEPTYNVAVGRAGRALVIVMGKEGVHGGTLNKKAYELALYLRRSDV

SEQ ID NO: 485 - DNA, 1697 bp, Homo sapiens
gaagggctcgaagatggccggttggcagagctacgtggataacctgatgtgcgatggctgctgccaggaggccgccattgtcggctactgcgacgccaaatacgtctgggcagccacggccgggggcgtctttcagagcattacgccaatagaaatagatatgattgtaggaaaagaccgggaaggtttctttaccaacggtttgactcttggcgcgaagaaatgctcagtgatcagagatagtctatacgtcgatggtgactgcacaatggacatccggacaaagagtcaaggtggggagccaacatacaatgtggctgtcggcagagctggtagagcattggttatagtcatgggaaaggaaggtgtccacggaggcacacttaacaagaaagcatatgaactcgctttatacctgaggaggtctgatgtgtaagcagcctctccccatctacctagcaactgtcttcatcaacaaccctaattatggtcacaatgctaccaaactgtagatggtagctaatttttctttacctattttctaatgtcatgattcctgtttgcccaatggatcatttgtatgttaaccactgtatgtaaccaacccttatctggcaacataattgcagcacaataatgatttgcatgataccttgaaattggggggagggggcatgccaagttgggcatcactttgtcttagcaattaatgggatattgattactaaaataagttaatattaagcaaggtgccggttgtacaatctctgatcagtgtcttttcagcactttgagcatttacttggctcatttagtcttccttttgtagcgcatggttgggaggaaaaagtgcatgcatcattccttcactcttctctttttcccgcccccccctcccttcgcacataggcatttggtttgcttccatctttttttatgcagtgcctgtttttttttaaccaattaaaatcccttttgttgatgagctattgagagctgcagtagtttgcttttagtattgttgttgcacttgagcagagacaaacctttattcatagtgtctacaggacatatgaagagtgcaatggcaaaacaagagcaaaaagcacttcctcccatgaccttacagtaaccatactgattgaatccccagggacattccatcattgcaatagctcagatttttcttcctttttctttgcacaccagctctactctttagtaaaattgtaaaaggctgccattatggacattaggtatcccaacataaccatctggagtgtgtccagtttgttcttcataggaccaatttttatttgcagcttgagtttttatatgaagttgcattattgtggacttggctgtcttgtgatgaatttttttcatatgtattctgtgccatactattgttaaaatgaactgttgctattgtgagatggattttaactgacctattaagggtttctttcgaatggcactactttagggacattctagtatttgcttctattgtttgggccttgtggataatgtacagatttaaaaacaaatcttgttgctgatttgtccatttctttccctgcactttgttacatctgggatacagtctaactcatctgatttaatatgcatttaaaaaaatgccataactattaaacaccttgtttacagacagatgaaataaatttattccaacc

SEQ ID NO: 486 - protein, 303 aa, Homo sapiens
MARGKAKEEGSWKKFIWNSEKKEFLGRTGGSWFKILLFYVIFYGCLAGIFIGTIQVMLLTISEFKPTYQDRVAPPGLTQIPQIQKTEISFRPNDPKSYEAYVLNIVRFLEKYKDSAQRDDMIFEDCGDVPSEPKERGDFNHERGERKVCRFKLEWLGNCSGLNDETYGYKEGKPCIIIKLNRVLGFKPKPPKNESLETYPVMKYNPNVLPVQCTGKRDEDKDKVGNVEYFGLGNSPGFPLQYYPYYGKLLQPKYLQPLLAVQFTNLTMDTEIRIECKAYGENIGYSEKDRFQGRFDVKIEVKS

SEQ ID NO: 487 - DNA, 2208 bp, Homo sapiens
gaattcatgctaaattgctggaaggctgcgtctctgctgtggtgtcagttccggatgcctcatcgccaggggcgcgccgcagccacccaccctccggaccgcggcagctgctgacccgccatcgccatggcccgcgggaaagccaaggaggagggcagctggaagaaattcatctggaactcagagaagaaggagtttctgggcaggaccggtggcagttggtttaagatccttctattctacgtaatattttatggctgcctggctggcatcttcatcggaaccatccaagtgatgctgctcaccatcagtgaatttaagcccacatatcaggaccgagtggccccgccaggattaacacagattcctcagatccagaagactgaaatttcctttcgtcctaatgatcccaagagctatgaggcatatgtactgaacatagttaggttcctggaaaagtacaaagattcagcccagagggatgacatgatttttgaagattgtggcgatgtgcccagtgaaccgaaagaacgaggagactttaatcatgaacgaggagagcgaaaggtctgcagattcaagcttgaatggctgggaaattgctctggattaaatgatgaaacttatggctacaaagagggcaaaccgtgcattattataaagctcaaccgagttctaggcttcaaacctaagcctcccaagaatgagtccttggagacttacccagtgatgaagtataacccaaatgtccttcccgttcagtgcactggcaagcgagatgaagataaggataaagttggaaatgtggagtattttggactgggcaactcccctggttttcctctgcagtattatccgtactatggcaaactcctgcagcccaaatacctgcagcccctgctggccgtacagttcaccaatcttaccatggacactgaaattcgcatagagtgtaaggcgtacggtgagaacattgggtacagtgagaaagaccgttttcagggacgttttgatgtaaaaattgaagttaagagctgatcacaagcacaaatctttcccactagccatttaataagttaaaaaaagatacaaaaacaaaaacctactagtcttgaacaaactgtcatacgtatgggacctacacttaatctatatgctttacactagctttctgcatttaataggttagaatgtaaattaaagtgtagcaatagcaacaaaatatttattctactgtaaatgacaaaagaaaaagaaaaattgagccttgggacgtgcccatttttactgtaaattatgattccgtaactgaccttgtagtaagcagtgtttctggcccctaagtattgctgccttgtgtattttatttagtgtacagtactacaggtgcatactctggtcatttttcaagccatgttttattgtatctgttttctactttatgtgagcaaggtttgctgtccaaggtgtaaatattcaacgggaataaaactggcatggtaattttttttttttgtttgttttttgttttttggctctttcaaaggtaatggcccatcgatgagcatttttaacatactccatagtcttttcctgtggtgttaggtctttatttttatttttttcctgggggctggggtgggggtttgtcatgggggaactgccctttaaattttaagtgacactacagaaaaacacaaaaaggtgatgggttgtgttatgcttgtattgaatgctgtcttgacatctcttgccttgtcctccggtatgttctaaagctgtgtctgagatctggatctgcccatcactttggcctagggacagggctaattaatttgctttatacattttcttttactttccttttttcctttctggaggcatcacatgctggtgctgtgtctttatgaatgttttaaccattttcatggtggaagaattttatatttatgcagttgtacaattttatttttttctgcaagaaaaagtgtaatgtatgaaataaaccaaagtcacttgtttgaaaataaatctttattttgaactttataaaagcaatgcagtaccccatagactggtgttaaatgttgtctacagtgcaaaatccatgttctaacatatgtaataattgccaggagtacagtgctcttgttgatcttgtattcagtcaggttaaaacaacggacaataaaagaatgaaccgaattc

SEQ ID NO: 488 - protein, 211 aa, Homo sapiens
MANSGLQLLGFSMALLGWVGLVACTAIPQWQMSSYAGDNIITAQAMYKGLWMDCVTQSTGMMSCKMYDSVLALSAALQATRALMVVSLVLGFLAMFVATMGMKCTRCGGDDKVKKARIAMGGGIIFIVAGLATLVACSWYGHQIVTDFYNPLIPTNIKYEFGPAIFIGWAGSALVILGGALLSCSCPGNESKAGYRAPRSYPKSNSSKEYV

SEQ ID NO: 489 - DNA, 1341 bp, Homo sapiens
ggcacgaggctgctggctcacctccgagccacctctgctgcgcaccgcagcctcggacctacagcccaggatactttgggacttgccggcgctcagaaacgcgcccagacggcccctccaccttttgtttgcctagggtcgccgagagcgcccggagggaaccgcctggccttcggggaccaccaattttgtctggaaccaccctcccggcgtatcctactccctgtgccgcgaggccatcgcttcactggaggggtcgatttgtgtgtagtttggtgacaagatttgcattcacctggcccaaaccctttttgtctctttgggtgaccggaaaactccacctcaagttttcttttgtggggctgccccccaagtgtcgtttgttttactgtagggtctcccgcccggcgcccccagtgttttctgagggcggaaatggccaattcgggcctgcagttgctgggcttctccatggccctgctgggctgggtgggtctggtggcctgcaccgccatcccgcagtggcagatgagctcctatgcgggtgacaacatcatcacggcccaggccatgtacaaggggctgtggatggactgcgtcacgcagagcacggggatgatgagctgcaaaatgtacgactcggtgctcgccctgtccgcggccttgcaggccactcgagccctaatggtggtctccctggtgctgggcttcctggccatgtttgtggccacgatgggcatgaagtgcacgcgctgtgggggagacgacaaagtgaagaaggcccgtatagccatgggtggaggcataattttcatcgtggcaggtcttgccaccttggtagcttgctcctggtatggccatcagattgtcacagacttttataaccctttgatccctaccaacattaagtatgagtttggccctgccatctttattggctgggcagggtctgccctagtcatcctgggaggtgcactgctctcctgttcctgtcctgggaatgagagcaaggctgggtaccgtgcaccccgctcttaccctaagtccaactcttccaaggagtatgtgtgacctgggatctccttgccccagcctgacaggctatgggagtgtctagatgcctgaaagggcctggggctgagctcagcctgtgggcagggtgccggacaaaggcctcctggtcactctgtccctgcactccatgtatagtcctcttgggttgggggtgggggggtgccgttggtgggagagacaaaaagagggagagtgtgctttttgtacagtaataaaaaataagtattgggaaaaaaaaaaaaaaaaaaaaaaaaaaaaaaaaaaaaa

SEQ ID NO: 490 - DNA, 1110 bp, Homo sapiens
cctgagaagggtctagcggacgcaggtcaccagctgggcaacattcagaaagttagtcttcctatgctcattttcctgggctgttacagaagaagactggaagaggtaatttccaaggttcttcccagctctgaagttgtgtgtcaaagcgcgcagggaccatgtcggcggagaccgcgagcggccccacagaggaccaggtggaaatcctggagtacaacttcaacaaggtcgacaagcacccggattccaccacgctgtgcctcatcgcggccgaggcaggcctttccgaggaggagacccagaaatggtttaagcagcgcctggcaaagtggcggcgctcagaaggcctgccctcagagtgcagatccgtcacagactaaggagatggcaggcattgacagcttcactccatgaaggccatctctgtttctctcctccgcttaaccaagctgttgtggtttttcagcatagtgttgtatgttccattgctagctgtcctgctgtttaacacagtgttgtattttttttctaaatgtacataattagaaaagaaaataacaataggaagctatgtgtatcttctgtgtaaagcagtggcttcactggaaaaatggtgtggctagcatttccctttgagtcatgatgacagatggtgtgaaaaccatctaagtttgcttttgaccatcacctcccagtagcaatttgctttcataatccatttagcaatccaggcctctgttgaaaagataatatgagggagaagggaacacatttccttctgaacttacttccctaagtcactttccttatgtatcatctaatacaatgatggttgagtgaaaatacagaaggggtgtttgagtattcagatttcataaaacacttccttggaatatagctgcattaacttggaaagaagcctgttgggccagaagacagaaactccaactggcaaaaaagcaagcaatctaagaaaaaaaaccaccaaagttcttgaatttactatatttaaatgcattggttaagtttattttgctaaataaagtgaactgctttttgtctctaaaatgatattctaaataaaaccttaactttttgttgaaaaaa

SEQ ID NO: 491 - protein, 832 aa, Homo sapiens
MKPPGSSSRQPPLAGCSLAGASCGPQRGPAGSVPASAPARTPPCRLLLVLLLLPPLAASSRPRAWGAAAPSAPHWNETAEKNLGVLADEDNTLQQNSSSNISYSNAMQKEITLPSRLIYYINQDSESPYHVLDTKARHQQKHNKAVHLAQASFQIEAFGSKFILDLILNNGLLSSDYVEIHYENGKPQYSKGGEHCYYHGSIRGVKDSKVALSTCNGLHGMFEDDTFVYMIEPLELVHDEKSTGRPHIIQKTLAGQYSKQMKNLTMERGDQWPFLSELQWLKRRKRAVNPSRGIFEEMKYLELMIVNDHKTYKKHRSSHAHTNNFAKSVVNLVDSIYKEQLNTRVVLVAVETWTEKDQIDITTNPVQMLHEFSKYRQRIKQHADAVHLISRVTFHYKRSSLSYFGGVCSRTRGVGVNEYGLPMAVAQVLSQSLAQNLGIQWEPSSRKPKCDCTESWGGCIMEETGVSHSRKFSKCSILEYRDFLQRGGGACLFNRPTKLFEPTECGNGYVEAGEECDCGFHVECYGLCCKKCSLSNGAHCSDGPCCNNTSCLFQPRGYECRDAVNECDITEYCTGDSGQCPPNLHKQDGYACNQNQGRCYNGECKTRDNQCQYIWGTKAAGSDKFCYEKLNTEGTEKGNCGKDGDRWIQCSKHDVFCGFLLCTNLTRAPRIGQLQGEIIPTSFYHQGRVIDCSGAHVVLDDDTDVGYVEDGTPCGPSMMCLDRKCLQIQALNMSSCPLDSKGKVCSGHGVCSNEATCICDFTWAGTDCSIRDPVRNLHPPKDEGPKGPSATNLIIGSIAGAILVAAIVLGGTGWGFKNVKKRRFDPTQQGPI

SEQ ID NO: 492 - DNA, 3054 bp, Homo sapiens
tcctctgcgtcccgccccgggagtggctgcgaggctaggcgagccgggaaagggggcgccgcccagccccgagccccgcgccccgtgccccgagcccggagccccctgcccgcggcggcaccatgcgcgccgagccggcgtgaccggctccgcccgcggccgccccgcagctagcccggcgctctcgccggccacacggagcggcgcccgggagctatgagccatgaagccgcccggcagcagctcgcggcagccgcccctggcgggctgcagccttgccggcgcttcctgcggcccccaacgcggccccgccggctcggtgcctgccagcgccccggcccgcacgccgccctgccgcctgcttctcgtccttctcctgctgcctccgctcgccgcctcgtcccggccccgcgcctggggggctgctgcgcccagcgctccgcattggaatgaaactgcagaaaaaaatttgggagtcctggcagatgaagacaatacattgcaacagaatagcagcagtaatatcagttacagcaatgcaatgcagaaagaaatcacactgccttcaagactcatatattacatcaaccaagactcggaaagcccttatcacgttcttgacacaaaggcaagacaccagcaaaaacataataaggctgtccatctggcccaggcaagcttccagattgaagccttcggctccaaattcattcttgacctcatactgaacaatggtttgttgtcttctgattatgtggagattcactacgaaaatgggaaaccacagtactctaagggtggagagcactgttactaccatggaagcatcagaggcgtcaaagactccaaggtggctctgtcaacctgcaatggacttcatggcatgtttgaagatgataccttcgtgtatatgatagagccactagagctggttcatgatgagaaaagcacaggtcgaccacatataatccagaaaaccttggcaggacagtattctaagcaaatgaagaatctcactatggaaagaggtgaccagtggccctttctctctgaattacagtggttgaaaagaaggaagagagcagtgaatccatcacgtggtatatttgaagaaatgaaatatttggaacttatgattgttaatgatcacaaaacgtataagaagcatcgctcttctcatgcacataccaacaactttgcaaagtccgtggtcaaccttgtggattctatttacaaggagcagctcaacaccagggttgtcctggtggctgtagagacctggactgagaaggatcagattgacatcaccaccaaccctgtgcagatgctccatgagttctcaaaataccggcagcgcattaagcagcatgctgatgctgtgcacctcatctcgcgggtgacatttcactataagagaagcagtctgagttactttggaggtgtctgttctcgcacaagaggagttggtgtgaatgagtatggtcttccaatggcagtggcacaagtattatcgcagagcctggctcaaaaccttggaatccaatgggaaccttctagcagaaagccaaaatgtgactgcacagaatcctggggtggctgcatcatggaggaaacaggggtgtcccattctcgaaaattttcaaagtgcagcattttggagtatagagactttttacagagaggaggtggagcctgccttttcaacaggccaacaaagctatttgagcccacggaatgtggaaatggatacgtggaagctggggaggagtgtgattgtggttttcatgtggaatgctatggattatgctgtaagaaatgttccctctccaacggggctcactgcagcgacgggccctgctgtaacaatacctcatgtctttttcagccacgagggtatgaatgccgggatgctgtgaacgagtgtgatattactgaatattgtactggagactctggtcagtgcccaccaaatcttcataagcaagacggatatgcatgcaatcaaaatcagggccgctgctacaatggcgagtgcaagaccagagacaaccagtgtcagtacatctggggaacaaaggctgcagggtctgacaagttctgctatgaaaagctgaatacagaaggcactgagaagggaaactgcgggaaggatggagaccggtggattcagtgcagcaaacatgatgtgttctgtggattcttactctgtaccaatcttactcgagctccacgtattggtcaacttcagggtgagatcattccaacttccttctaccatcaaggccgggtgattgactgcagtggtgcccatgtagttttagatgatgatacggatgtgggctatgtagaagatggaacgccatgtggcccgtctatgatgtgtttagatcggaagtgcctacaaattcaagccctaaatatgagcagctgtccactcgattccaagggtaaagtctgttcgggccatggggtgtgtagtaatgaagccacctgcatttgtgatttcacctgggcagggacagattgcagtatccgggatccagttaggaaccttcacccccccaaggatgaaggacccaagggtcctagtgccaccaatctcataataggctccatcgctggtgccatcctggtagcagctattgtccttgggggcacaggctggggatttaaaaatgtcaagaagagaaggttcgatcctactcagcaaggccccatctgaatcagctgcgctggatggacaccgccttgcactgttggattctgggtatgacatactcgcagcagtgttactggaactattaagtttgtaaacaaaacctttgggtggtaatgactacggagctaaagttggggtgacaaggatggggtaaaagaaaactgtctcttttggaaataatgtcaaagaacacctttcaccacctgtcagtaaacgggggagggggcaaaagaccatgctataaaaagaactgttccagaatctttttttttccctaatggacgaaggaacaacacacacacaaaaattaaatgcaataaaggaatcattaaaaa

SEQ ID NO: 493 - protein, 744 aa, Homo sapiens
MAVLPGPLQLLGVLLTISLSSIRLIQAGAYYGIKPLPPQIPPQMPPQIPQYQPLGQQVPHMPLAKDGLAMGKEMPHLQYGKEYPHLPQYMKEIQPAPRMGKEAVPKKGKEIPLASLRGEQGPRGEPGPRGPPGPPGLPGHGIPGIKGKPGPQGYPGVGKPGMPGMPGKPGAMGMPGAKGEIGQKGEIGPMGIPGPQGPPGPHGLPGIGKPGGPGLPGQPGPKGDRGPKGLPGPQGLRGPKGDKGFGMPGAPGVKGPPGMHGPPGPVGLPGVGKPGVTGFPGPQGPLGKPGAPGEPGPQGPIGVPGVQGPPGIPGIGKPGQDGIPGQPGFPGGKGEQGLPGLPGPPGLPGIGKPGFPGPKGDRGMGGVPGALGPRGEKGPIGAPGIGGPPGEPGLPGIPGPMGPPGAIGFPGPKGEGGIVGPQGPPGPKGEPGLQGFPGKPGFLGEVGPPGMRGLPGPIGPKGEAGQKGVPGLPGVPGLLGPKGEPGIPGDQGLQGPPGIPGIGGPSGPIGPPGIPGPKGEPGLPGPPGFPGIGKPGVAGLHGPPGKPGALGPQGQPGLPGPPGPPGPPGPPAVMPPTPPPQGEYLPDMGLGIDGVKPPHAYGAKKGKNGGPAYEMPAFTAELTAPFPPVGAPVKFNKLLYNGRQNYNPQTGIFTCEVPGVYYFAYHVHCKGGNVWVALFKNNEPVMYTYDEYKKGFLDQASGSAVLLLRPGDRVFLQMPSEQAAGLYAGQYVHSSFSGYLLYPM

SEQ ID NO: 494 - DNA, 2506 bp, Homo sapiens
ctccgtgggagccagcgagcctctctccctgatcttacgtgctcaagggagctcacacgttcaccaactcacccttgaagtcatctcaagaacaaaagacaactgaaagaagctgttgtgaaggcagagcagcatctgctgaagagacagaaaccagccccagaggtgtcacaggaaggcaccagcaaggacattggtctttgatttgattcagcagtcctgtcaagtataaatgtgatggctgtgctgcctggccctctgcagctgctgggagtgctgcttaccatttccctgagttccatcaggctcattcaggctggtgcctactatgggatcaagccgctgccacctcaaattcctcctcagatgccaccacaaattccacaataccagcccctgggtcagcaagtacctcacatgcctttggccaaagatggccttgccatgggcaaggagatgccccacttgcagtatggcaaagagtatccacacctaccccaatatatgaaggaaattcaaccggcgccaagaatgggcaaggaagccgtacccaagaaaggcaaagaaataccattagccagtttacgaggggaacaaggtccccgtggagagcctggcccaagaggaccacctgggccccctggtttgccaggtcatgggatacctggaattaaaggaaaaccagggccacagggatatccaggagttggaaagccaggtatgcctggaatgccagggaagccaggagccatgggcatgcctggggcaaaaggagaaattggacagaaaggggaaattgggcctatggggatcccaggaccacaaggacctccagggcctcatggacttcctggcattgggaagccaggtgggccagggttaccagggcaaccaggaccaaagggtgatcgaggacccaaaggactaccaggacctcaaggccttcggggtcctaaaggagacaagggcttcgggatgccaggtgcgccaggtgtaaaggggcctccagggatgcacggccctcccggccctgttggactgccaggagtgggcaaaccaggagtgacaggcttccctgggccccagggccccctgggaaagccaggggctccaggagaacctgggccacaaggccctattggggtaccgggggttcaaggacctcctgggatacccggaattggaaagccaggccaggatgggatcccaggccagccaggatttccaggtggcaaaggggagcaaggactgccagggctaccaggacccccaggccttccagggattgggaaaccaggcttcccaggacccaaaggtgaccggggcatgggaggtgttcctggggctcttggaccaagaggggagaaaggaccaataggtgccccaggaatagggggtcctccaggagagccaggcctgcctggaatcccaggtcctatgggccctccaggtgctattggttttcctggacccaaaggagaaggtgggattgtagggccacaggggccaccaggtcccaagggtgagccagggcttcaaggcttcccaggaaagccaggtttccttggtgaagtagggcctcctggcatgaggggtttgccaggtcccatagggcccaagggggaagctgggcaaaaaggtgtaccaggactccctggtgttccagggcttctcggacctaagggagagccaggaatcccaggggatcagggtttacagggccccccaggtatcccagggattgggggccctagtggccccattggaccacctgggattccaggccccaaaggggagccgggcctcccagggccccctgggttccctggtatagggaaacccggagtggcaggacttcatggccccccagggaagcctggtgcccttggtcctcaaggccagcctggccttccaggacccccaggccctccaggacctccaggacccccagctgtgatgccccctacaccaccaccccagggagagtatctgccagatatggggctgggaattgatggcgtgaaacccccccatgcctacggggctaagaaaggcaagaatggagggccagcctatgagatgcctgcatttaccgccgagctaaccgcacctttcccaccggtgggggccccagtgaagtttaacaaactgctgtataacggcagacagaactacaacccgcagacaggcatcttcacctgtgaggtccctggtgtctactactttgcataccacgttcactgcaaggggggcaacgtgtgggttgctctattcaagaacaacgagcccgtgatgtacacgtacgacgagtacaaaaagggcttcctggaccaggcatctgggagtgcagtgctgctgctcaggcccggagaccgggtgttcctccagatgccctcagaacaggctgcaggactgtatgccgggcagtatgtccactcctccttttcaggatatttattgtatcccatgtaaaaacaaaaaaacaaaaaacaaagaaaaaaaaaaa

SEQ ID NO: 495 - protein, 847 aa, Homo sapiens [sequence omitted]

SEQ ID NO: 496 - DNA, 5424 bp, Homo sapiens
ggttaccttccctttgggcgtcaacttctgccacacctccttagggagagggtgtagcatagtagttaagaggggtccagggccagaatgcctgggtttaaatcctagctctgcctcttaccagctatgtagacctgggcaagtcattcgacgtttttggacttccatttcttcatctgtaagatggaattattataatccctacttccatagcctggtaaagagcaaataaatatatggaaaggcttgaaatagtggctggcacgtgtaagcattaggattggtcgttgtcattgatggagtctcaggttcggtctgatcctcagcccctgtgattctgtcgtgagggcactcacagctcactgcctgccctaaacaggctccagctctggccctccctcggctcacacctttccccctctccccctaggagatcctgctgggccgtggcttcaccttttggcagtggtttgatggtgtcctggacctcaccaaacgctgtctccggagctactggtctgaccggtgagtccccaccctgggtagtttgagcagccatacaccagtcacctccatactcactgcccatgccccatcctctccttcatcccggccaggctgatcattggcttcatcagcaaacagtacgttactagccttcttctcaatgagcccgacggaacctttctcctccgcttcagcgactcagagattgggggcatcaccattgcccatgtcatccggggccaggatggtgaggccaccccagccagtcctctgtctctgtgcctgtgccctctggggtttcttctgggaatgaaatgtcctgaccttcctgatgccgatcctgatcttcaggaagttcttccagcttctcttcttccttctgtggtctaaatgttcaccttctcactgtgagctctgtgggaacggagactagtgggtctctctccctcaggagccccaccctaggtcctctctcccttgccttggtggagtgagaacaggtcttatggtaggggttggggaaggggaagaaatccggacagagggatctcagggtctccttcctaccataggctctccacagatagagaacatccagccattctctgccaaagacctgtccattcgctcactgggggaccgaatccgggatcttgctcagctcaaaaatctctatcccaagaagcccaaggatgaggctttccggagccactacaagcgtgagctggaactggcagctctgattccttcctgtcacccacttcctgccatgctccccgctgccatcctctccccagcccgtgagttatcctgaggtcactccgaatttccatagctgtgcttttcttacttcccggatgatccatgcccaccttttccacctcccttcctccctaacccgagagcaatccatggcagtcttttccatctcacaacagctgaacagctgaacagatgggtaaggatggcaggggttatgtcccagctaccatcaagatgaccgtggaaaggtgagtgtggtggtatggacagtgggtaggtcaggggcttagtgcttatctgcaggaaggaggggtggcatcaacccttggtcagtcacatgtacctccttccctcctccagggaccaaccacttcctaccccagagctccagatgcctaccatggtgccttcttatgaccttggaatggcccctgattcctccatgagcatgcagcttggcccagatatggtgtaaggagctggaaagacaggaatgggagtggtctgtgcagatgggctaatcttagcatgggcagctgggagagctggcactgggggctgaacagggaatcttcctttccatgagagggacacctgttcaaaagcagggtgtggtggtgtccaggagaagggctggcatcagggggtctgttttctttccccaggccccaggtgtacccaccacactctcactccatccccccgtatcaaggcctctccccagaagaatcagtcaacgtgttgtcagccttccaggagtaagtgaaaaacctcatggggataccatcccactctaagggggtgggcatttgaattgttagaagaggctcttctgtgagaaaggagcagcaaatgctaacagcctgtcttcttctcttctgtccactctaatgagggggtagtagttaagatctggactgcctaggtttgaattctagctccaccacttactggtttggggcaaattacttagcctttggtgccttatctgcacaatgggggataataatgctaataataataacctacctcactgcattattgtggagattaaatgagttcataacacttaaaaagctcgagcatagtgcatggctcatagcaaaagctgtgtaagtccagtcgtggatcacttaatgaaggagcattttctgtctttggcagtttcataattatgcggaataccattgagtataattacacaaacctagatggtatagactactatacactgaggctatattgtgtagcctattgatcctagctttaaacccgagcagcatgatactgttctgaatagtataaggaaatagtaacataatggtaaatatttgtgtgataggaattttcagcttgattataattttttttttttgagacagggtctcactcactggagtgcagtggtgcgatcttagctcccctgcaacctccgcctcttgggctcgagcaatcctcctgctgtagtgcaccacgacactcggctaattcttttttaagatttttctgcagacaaggtctcacttactgcccaagctggtctcaaactcctgggcttaagtgatcctcccacctcggcctcccaaagcgttaggattacaggcgtgagtcactctgcctggccttgattataatcttatgggaccactgtggtctgtagttgacagaaatgtcgttaatgtggtgcatgactgttattattattttctgtcctgcccctgagagccactgtcacttctctgctgtattggtttttgtttactcatctgttttggccttgaaatggcctagacatttttcttcccgaagtatgacactcgggtgcttattaacttagtcaagacacaacatctcccttcccagaaagtgaggcgggagtgaggacttggggacttaagaactaccaaagttcagagtccaaaggaaacattagaaattgggtaatccacccccataacacgcacattttacagatgagaagactgagctcagagcatagaaatagcttgcccaggccatgactaagtcaggataaggagctggagcttgtttcctcactcagtggtcctgactttgcaccactctgcatttgcctagcctgccttcctctaactgtgctctccctacttccaggcctcacctgcagatgccccccagcctgggccagatgaacctgccctttgaccagcctcacccccaggtgaatgacaaaagcccctcctgacccatgtgcctcttctttcctgggccttgcccgctctccttatttccattgctggttcctggcagggcctgctgccgtgccagcctcaggagcatgctgtgtccagccctgaccccctgctctgctcagatgtgaccatggtggaagacagctgcctgagccagccagtgacagcgtttcctcagggcacttggtgagtggcagcttgggagtggaggctgggtggcatctaggggagtgggcgccatgcctactccactgcttctcccatctccttgcaggattggtgaagacatattccctcctctgctgcctcccactgaacaggacctcactaagcttctcctggaggggcaaggggagtcggggggagggtccttgggggcacagcccctcctgcagccctcccactatgggcaatctgggatctcaatgtcccacatggacctaagggccaaccccagttggtgatcccagctggagggagaacccaaagagacagctcttctactacccccacagacctgctctggacacttgctcatgccctgccaagcagcagatggggagggtgccctcctatccccacctactcctgggtcaggaggaaaagactaacaggagaatgcacagtgggtggagccaatccactccttcctttctatcattcccctgcccacctccttccagcactgactggaagggaagttcaggctctgagacacgccccaacatgcctgcacctgcagcgcgcacacgcacgcacacacacatacagagctctctgagggtgatggggctgagcaggaggggggctgggtaagagcacaggttagggcatggaaggcttctccgcccattctgacccagggcctaggacggataggcaggaacatacagacacatttacactagaggccagggatagaggatattgggtctcagccctaggggaatgggaagcagctgaagggaccctgggtgggagcataggaggagtctggacatgtggttactagtacaggttttgccctgattaaaaaatctcccaaagccccaaattcctgttagccaggtggaggcttctgatacgtgtatgagactatgcaaaagtacaagggctgagattcttcgtgtatagctgtgtgaacgtgtatgtacctaggatatgttaaatatatagctggcaccttagttgcatgaccacatagaacatgtgtctatctgcttttgcctacgtgacaacacaaatttgggagggtgagacactgcacagaagacagcagcaagtgtgctggcctctctgacatatgctaacccccaaatactctgaatttggagtctgactgtgcccaagtgggtccaagtggctgtgacatctacgtatggctccacacctccaatgctgcctgggagccagggtgagagtctgggtccaggcctggccatgtggccctccagtgtatgagagggccctgcctgctgcatcttttctgttgccccatccaccgccagcttcccttcactcccctatcccattctccctctcaaggcaggggtcatagatcctaagccataaaataaattttattccaaaataacaaaataaataatctactgtacacaatctgaaaagaaagacgctctaactgctcagataggtgctgcggtccagcccccagctggaggagaccctgagtccaacccaggcctcccgagggggccagtgaagggatcccacacccaccgcccctatgtagggcagggaagaaattgcaaaggacttgggggatagatgggaatgggagggcaaactgcagcacttgttaaattaattaaagaaacaaaccagaagcacaaaaacggggaaggagaagggagaaggagcaggtccagtgttccaggccccaattctgggggcaaatgtgcca

SEQ ID NO: 497 - protein, 323 aa, Homo sapiens
MASIWVGHRGTVRDYPDFSPSVDAEAIQKAIRGIGTDEKMLISILTERSNAQRQLIVKEYQAAYGKELKDDLKGDLSGHFEHLMVALVTPPAVFDAKQLKKSMKGAGTNEDALIEILTTRTSRQMKDISQAYYTVYKKSLGDDISSETSGDFRKALLTLADGRRDESLKVDEHLAKQDAQILYKAGENRWGTDEDKFTEILCLRSFPQLKLTFDEYRNISQKDIVDSIKGELSGHFEDLLLAIVNCVRNTPAFLAERLHRALKGIGTDEFTLNRIMVSRSEIDLLDIRTEFKKHYGYSLYSAIKSDTSGDYEITLLKICGGDD

SEQ ID NO: 498 - DNA, 1339 bp, Homo sapiens
gaattccgattagtgtgatctcagctcaaggcaaaggtgggatatcatggcatctatctgggttggacaccgaggaacagtaagagattatccagactttagcccatcagtggatgctgaagctattcagaaagcaatcagaggaattggaactgatgagaaaatgctcatcagcattctgactgagaggtcaaatgcacagcggcagctgattgttaaggaatatcaagcagcatatggaaaggagctgaaagatgacttgaagggtgatctctctggccactttgagcatctcatggtggccctagtgactccaccagcagtctttgatgcaaagcagctaaagaaatccatgaagggcgcgggaacaaacgaagatgccttgattgaaatcttaactaccaggacaagcaggcaaatgaaggatatctctcaagcctattatacagtatacaagaagagtcttggagatgacattagttccgaaacatctggtgacttccggaaagctctgttgactttggcagatggcagaagagatgaaagtctgaaagtggatgagcatctggccaaacaagatgcccagattctctataaagctggtgagaacagatggggcacggatgaagacaaattcactgagatcctgtgtttaaggagctttcctcaattaaaactaacatttgatgaatacagaaatatcagccaaaaggacattgtggacagcataaaaggagaattatctgggcattttgaagacttactgttggccatagttaattgtgtgaggaacacgccggcctttttagccgaaagactgcatcgagccttgaagggtattggaactgatgagtttactctgaaccgaataatggtgtccagatcagaaattgaccttttggacattcgaacagagttcaagaagcattatggctattccctatattcagcaattaaatcggatacttctggagactatgaaatcacactcttaaaaatctgtggtggagatgactgaaccaagaagataatctccaaaggtccacgatgggctttcccaacagctccaccttacttcttctcatactatttaagagaacaagcaaatataaacagcaacttgtgttcctaacaggaattttcattgttctataacaacaacaacaaaagcgattattattttagagcatctcatttataatgtagcagctcataaatgaaattgaaaatggtattaaagatctgcaactactatccaacttatatttctgctttcaaagttaagaatctttatagttctactccattaaatataaagcaagataataaaacggaattc

SEQ ID NO: 499 - protein, 532 aa, Homo sapiens
MAPSSPRPALPALLVLLGALFPGPGNAQTSVSPSKVILPRGGSVLVTCSTSCDQPKLLGIETPLPKKELLLPGNNRKVYELSNVQEDSQPMCYSNCPDGQSTAKTFLTVYWTPERVELAPLPSWQPVGKNLTLRCQVEGGAPRANLTVVLLRGEKELKREPAVGEPAEVTTTVLVRRDHHGANFSCRTELDLRPQGLELFENTSAPYQLQTFVLPATPPQLVSPRVLEVDTQGTVVCSLDGLFPVSEAQVHLALGDQRLNPTVTYGNDSFSAKASVSVTAEDEGTQRLTCAVILGNQSQETLQTVTIYSFPAPNVILTKPEVSEGTEVTVKCEAHPRAKVTLNGVPAQPLGPRAQLLLKATPEDNGRSFSCSATLEVAGQLIHKNQTRELRVLYGPRLDERDCPGNWTWPENSQQTPMCQAWGNPLPELKCLKDGTFPLPIGESVTVTRDLEGTYLCRARSTQGEVTREVTVNVLSPRYEIVIITVVAAAVIMGTAGLSTYLYNRQRKIKKYRLQQAQKGTPMKPNTQATPP

SEQ ID NO: 500 - DNA, 2986 bp, Homo sapiens
gcgccccagtcgacgctgagctcctctgctactcagagttgcaacctcagcctcgctatggctcccagcagcccccggcccgcgctgcccgcactcctggtcctgctcggggctctgttcccaggacctggcaatgcccagacatctgtgtccccctcaaaagtcatcctgccccggggaggctccgtgctggtgacatgcagcacctcctgtgaccagcccaagttgttgggcatagagaccccgttgcctaaaaaggagttgctcctgcctgggaacaaccggaaggtgtatgaactgagcaatgtgcaagaagatagccaaccaatgtgctattcaaactgccctgatgggcagtcaacagctaaaaccttcctcaccgtgtactggactccagaacgggtggaactggcacccctcccctcttggcagccagtgggcaagaaccttaccctacgctgccaggtggagggtggggcaccccgggccaacctcaccgtggtgctgctccgtggggagaaggagctgaaacgggagccagctgtgggggagcccgctgaggtcacgaccacggtgctggtgaggagagatcaccatggagccaatttctcgtgccgcactgaactggacctgcggccccaagggctggagctgtttgagaacacctcggccccctaccagctccagacctttgtcctgccagcgactcccccacaacttgtcagcccccgggtcctagaggtggacacgcaggggaccgtggtctgttccctggacgggctgttcccagtctcggaggcccaggtccacctggcactgggggaccagaggttgaaccccacagtcacctatggcaacgactccttctcggccaaggcctcagtcagtgtgaccgcagaggacgagggcacccagcggctgacgtgtgcagtaatactggggaaccagagccaggagacactgcagacagtgaccatctacagctttccggcgcccaacgtgattctgacgaagccagaggtctcagaagggaccgaggtgacagtgaagtgtgaggcccaccctagagccaaggtgacgctgaatggggttccagcccagccactgggcccgagggcccagctcctgctgaaggccaccccagaggacaacgggcgcagcttctcctgctctgcaaccctggaggtggccggccagcttatacacaagaaccagacccgggagcttcgtgtcctgtatggcccccgactggacgagagggattgtccgggaaactggacgtggccagaaaattcccagcagactccaatgtgccaggcttgggggaacccattgcccgagctcaagtgtctaaaggatggcactttcccactgcccatcggggaatcagtgactgtcactcgagatcttgagggcacctacctctgtcgggccaggagcactcaaggggaggtcacccgcgaggtgaccgtgaatgtgctctccccccggtatgagattgtcatcatcactgtggtagcagccgcagtcataatgggcactgcaggcctcagcacgtacctctataaccgccagcggaagatcaagaaatacagactacaacaggcccaaaaagggacccccatgaaaccgaacacacaagccacgcctccctgaacctatcccgggacagggcctcttcctcggccttcccatattggtggcagtggtgccacactgaacagagtggaagacatatgccatgcagctacacctaccggccctgggacgccggaggacagggcattgtcctcagtcagatacaacagcatttggggccatggtacctgcacacctaaaacactaggccacgcatctgatctgtagtcacatgactaagccaagaggaaggagcaagactcaagacatgattgatggatgttaaagtctagcctgatgagaggggaagtggtgggggagacatagccccaccatgaggacatacaactgggaaatactgaaacttgctgcctattgggtatgctgaggcccacagacttacagaagaagtggccctccatagacatgtgtagcatcaaaacacaaaggcccacacttcctgacggatgccagcttgggcactgctgtctactgaccccaacccttgatgatatgtatttattcatttgttattttaccagctatttattgagtgtcttttatgtaggctaaatgaacataggtctctggcctcacggagctcccagtccatgtcacattcaaggtcaccaggtacagttgtacaggttgtacactgcaggagagtgcctggcaaaaagatcaaatggggctgggacttctcattggccaacctgcctttccccagaaggagtgatttttctatcggcacaaaagcactatatggactggtaatggttcacaggttcagagattacccagtgaggccttattcctcccttccccccaaaactgacacctttgttagccacctccccacccacatacatttctgccagtgttcacaatgacactcagcggtcatgtctggacatgagtgcccagggaatatgcccaagctatgccttgtcctcttgtcctgtttgcatttcactgggagcttgcactattgcagctccagtttcctgcagtgatcagggtcctgcaagcagtggggaagggggccaaggtattggaggactccctcccagctttggaagggtcatccgcgtgtgtgtgtgtgtgtatgtgtagacaagctctcgctctgtcacccaggctggagtgcagtggtgcaatcatggttcactgcagtcttgaccttttgggctcaagtgatcctcccacctcagcctcctgagtagctgggaccataggctcacaacaccacacctggcaaatttgattttttttttttttttcagagacggggtctcgcaacattgcccagacttcctttgtgttagttaataaagctttctcaactgcc

SEQ ID NO: 501 - protein, 524 aa, Homo sapiens
MGKPARKGCEWKRFLKNNWVLLSTVAAVVLGITTGVLVREHSNLSTLEKFYFAFPGEILMRMLKLIILPLIISSMITGVAALDSNVSGKIGLRAVVYYFCTTLIAVILGIVLVVSIKPGVTQKVGEIARTGSTPEVSTVDAMLDLIRNMFPENLVQACFQQYKTKREEVKPPSDPEMNMTEESFTAVMTTAISKNKTKEYKIVGMYSDGINVLGLIVFCLVFGLVIGKMGEKGQILVDFFNALSDATMKIVQIIMCYMPLGILFLIAGKIIEVEDWEIFRKLGLYMATVLTGLAIHSIVILPLIYFIVVRKNPFRFAMGMAQALLTALMISSSSATLPVTFRCAEENNQVDKRITRFVLPVGATINMDGTALYEAVAAVFIAQLNDLDLGIGQIITISITATSASIGAAGVPQAGLVTMVIVLSAVGLPAEDVTLIIAVDWLLDRFRTMVNVLGDAFGTGIVEKLSKKELEQMDVSSEVNIVNPFALESTILDNEDSDTKKSYVNGGFAVDKSDTISFTQTSQF

SEQ ID NO: 502 - DNA, 3468 bp, Homo sapiens
ggcggcgggcgcggtgcgcgatcccgggtggcggcggcaacggcggtggtgacggcggcgactgcagcggccggctctcacctctcccctgtgcacccgcatctcgccgcgccgccgagcagccagcagtccccgggtcgcccagcccacgcgcgcacggccgagcccagcgcacaatagcggcgacagccatggggaaaccggcgaggaaaggatgcgagtggaagcgcttcctgaagaataactgggtgttgctgtccaccgtggccgcggtggtgctaggcattaccacaggagtcttggttcgagaacacagcaacctctcaactctagagaaattctactttgcttttcctggagaaattctaatgcggatgctgaaactcatcattttgccattaattatatccagcatgattacaggtgttgctgcactggattccaacgtatccggaaaaattggtctgcgcgctgtcgtgtattatttctgtaccactctcattgctgttattctaggtattgtgctggtggtgagcatcaagcctggtgtcacccagaaagtgggtgaaattgcgaggacaggcagcacccctgaagtcagtacagtggatgccatgttagatctcatcaggaatatgttccctgagaatcttgtccaggcctgttttcagcagtacaaaactaagcgtgaagaagtgaagcctcccagcgatccagagatgaacatgacagaagagtccttcacagctgtcatgacaactgcaatttccaagaacaaaacaaaggaatacaaaattgttggcatgtattcagatggcataaacgtcctgggcttgattgtcttttgccttgtctttggacttgtcattggaaaaatgggagaaaagggacaaattctggtggatttcttcaatgctttgagtgatgcaaccatgaaaatcgttcagatcatcatgtgttatatgccactaggtattttgttcctgattgctgggaagatcatagaagttgaagactgggaaatattccgcaagctgggcctttacatggccacagtcctgactgggcttgcaatccactccattgtaattctcccgctgatatatttcatagtcgtacgaaagaaccctttccgatttgccatgggaatggcccaggctctcctgacagctctcatgatctcttccagttcagcaacactgcctgtcaccttccgctgtgctgaagaaaataaccaggtggacaagaggatcactcgattcgtgttacccgttggtgcaacaatcaacatggatgggactgcgctctatgaagcagtggcagcggtgtttattgcacagttgaatgacctggacttgggcattgggcagatcatcaccatcagtatcacggccacatctgccagcatcggagctgctggcgtgccccaggctggcctggtgaccatggtgattgtgctgagtgccgtgggcctgcccgccgaggatgtcaccctgatcattgctgtcgactggctcctggaccggttcaggaccatggtcaacgtccttggtgatgcttttgggacgggcattgtggaaaagctctccaagaaggagctggagcagatggatgtttcatctgaagtcaacattgtgaatccctttgccttggaatccacaatccttgacaacgaagactcagacaccaagaagtcttatgtcaatggaggctttgcagtagacaagtctgacaccatctcattcacccagacctcacagttctagggcccctggctgcagatgactggaaacaaggaaggacatttccgtgagagtcatctcaaacactgcttaaggaaaagagaaacactaatggccaagtgtacatttgatttgatatacagacctccagattattttctatatttggattcacagcctttgcgctctgggttttgggatttgggtgtggggtaagttgaagggaaatcaatttaaaggaaagttctattatctgggttttagaaattctataagagacaaagtttggaagtacataaagtaataactgttagaattaggtaatggatatgaaagagaaaatgctttctcatgcatagacaagtgttttgggtttttaaaaaaaatattctgtcattggttacaaatttttactcaggctttctattggcatggatttcctttgacctctcacttttttataaattataatgcatctaaaccacctgtccccagttaatgtgccaaaatgtcaatttttaacttatctccagccaatttcaaagaaaacagaccagcatagttctgcaataacagttttaagatgggcatagggtttggaagaaagggagaaggattcttttttcaatgtactgtattgggacgctggtaactgttaacccagtgttcagcatagagctatatatatatatatatgtatatatttattattttcatataatttgccagacagagatcagaattgaaccgtcaatgtgaaataaagagttctccttgtacttgaataataaccacgattccaacccaggtctgctttggggcttatcagaactcctttctaaggagcactagaatgagaaatcatgttgttcgatcgtttcacatctgtatatcagctctaaagcagagatgtattatggtgatactccaaggtggcatagccattcatttacaacttccagatttgagctgcctggagggaatccatatcagctctgcataagattatatacaaagctgtcactcacaaaaggctggatgtgctttcatccaactggaaggctttattcttccaagttcattcatactcaaagaggccagtactttgccatccttgcacttctgttatcagggcccaaataacagtggcaagctaccaactaagttgtattttaataaagattccatgggttgaacaagccacgttgcagaaaaagagcttcccctaacctgggttgttgcagagtaaatcccacgacataagctggtatcactggttcgggggaaatagttccattctatgactcttgtctcctcctccaggaggactgttctaactagtaatcttggccctattcattacatcctctgcttgtcattctgctaatttatgaagatagtttattatagtctgtacttcagttctcatcttgtaaataatgcttaacataaacttgtacttacactgaaatccaaaatagtcatgtttctgcagtattctgtagccaacttaaacctgtgctttcatgtttaagaaatgagaaattgtgccaaagatagcagaagagtagataagtgctcagtattgacgacctacatctgaaatctacaacataatgatactgaattgttatgtaaacatcataaatagtaaataatgattcaatgtgaattttaaaatgcaaatattgctattgtttataggaaataaatctaaatataaatg

SEQ ID NO: 503 - protein, 236 aa, Homo sapiens [sequence omitted]

SEQ ID NO: 504 - DNA, 2881 bp, Homo sapiens
gtcagacgaggagtatcgcgagctcttcgacctagccctgcggggtctgcagcttctatccaagtggagcgcccacgtcatggaggtgtactcttggaagctggttcatcccacagacaagttctgcaacaaggactgtcctggcaccgcggaggaatatgcgcgcgccacacgctacaattacaccagtgaggaaaaatttgccttcgttgaggtgatcgccatgatcaaaggcctgcaggtgctcatgggcaggatggagagcgtcttcaaccaggccatcaggaacaccatctacgcggcattgcaggacttcgcccaggtgacgctgcgtgagcccctgcggcaggcggtacggaagaagaagaatgtcctcatcagcgtcctacaggcaattcgaaagaccatctgtgactgggagggagggcgagaaccccctaatgacccatgcttgagaggggagaaggaccccaaaggtggatttgatatcaaggtgccccggcgtgctgtggggccatccagcacacagctgtacatggtgcggaccatgcttgaatcactcatttcagacaaaagcggctccaagaagaccctgaggagcagcctggatggacccattgtcctccccatagaggactttcacaaacagtccttcttcttcacacatctgctcaacatcagtgaagccctgcagcagtgttgtgacctctcccagctctggttccgagaattcttcctggagttaaccatgggccgacgaatccagttccccatcgagatgtccatgccctggattctaacggaccatatctggaaaccaaagaaccttccatgatggagtatgtcctctaccctctggatctctgtacaacgacagcgcctactatgctctgaccaagtttaaaaagcagttcctgtacgatgagatagaagctgaggtgaacctgtgttttgatcagtttgtctacaagctggcagaccagatctttgcttactacaaagccatggctggcagtgtcctgttggataaacgttttcgagctgagtgtaagaattatggcgtcatcattccgtatccaccgtccaatcgctatgaaacactgctgaagcagagacacgtccagctgttgggtagatcaattgacttgaacagactcattacccagcgcatctctgccgccatgtataaatccttggaccaagctatcagccgctttgagagtgaggacctgacctccattgtggagctggagtggctgctggagattaaccgcgtcacgcatcggctgctctgtaagcatatgacgctggacagcttcgatgccatgttcacgcatcggctgctctgtaagcatatgacgctggacagcttcgatgccatgttccgagaggccaatcacaatgtgtccgccccctatggccgtatcaccctgcatgtcttctgggaactgaactttgactttctccccaactactgctacaatgggtccactaaccgttttgtgcggactgccacttcctttcacccaagaaccacaacgagacaaacctgccaacgtccagccttattacctctatggatccaagcctctcaacattgcctacagccacatctacagctcctacaggaatttcgtggggccacctcatttcaagactatcctgcagactcctgggttatcagggcatcgctgtggtcatggaggaactgctaaagattgtgaagagcttgctccaaggaaccattctccagtatgtgaaaacactgatagaggtgatgcccaagatatgccgcttgccccgacatgagtatggctccccagggatcctggagttcttccaccaccagctgaaggacatcattgagtacgcagagctcaaaacagacgtgttccagagcctgagggaagtgggcaatgccatcctcttctgcctcctcatagagcaagctctgtctcaggaggaggtctgcgatttgctccatgccgcacccttccaaaacatcttgcctagagtctacatcaaagagggggagcgcctggaggtccggatgaaacgtctggaagccaagtatgccccgctccacctggtccctctgatcgagcggctggggacccctcagcaaatcgccattgctcgcgagggtgacctcctgaccaaggagcggctgtgctgtggcctgtccatgttcgaggtcatcctgacccgcattcggagctacctgcaggaccccatctggcggggccaaccggccaaccaatggcgtatgcacttcgatgagtgttggattccaccggctgtggagcgccatcgacagttcgtgtactgcatccctgtgggaacaaacgagttcacagttgagacagtgtttcggcgatggcttgaactgggctggttgctccatcattgtcctgctgggccagcacggtcgcttgacctgttcgacttctgttaccacctgctaaaagtgcagaggcaggacggaaggatgaaatcattaagaatgtgcccctgaagaagatggccgaccggatcaggaagtatcagatcttgaacaatgaggtttttgccatcctgaacaaatacatgaagtccgtggagacagacagttccactgtggagcatgtgcgctgcttccaaccacccatccaccagtccttggccaccacttgctaagcagagatcctgcagacccttatctggaggaggaagagaagcaggagagagaaaccacagccagcctgccataggatccaactggacaacgtgtgggatggacctggaaacaagcacctccccaaacacatcaccactccctagggcggggcctgtgcatgctctcccatgacatctccatgctggtttctccatagcataaatg

SEQ ID NO: 505 - protein, 1025 aa, Homo sapiens
MAPVLSKDSADIESILALNPRTQTHATLCSTSAKKLDKKHWKRNPDKNCFNCEKLENNFDDIKHTTLGERGALREAMRCLKCADAPCQKSCPTNLDIKSFITSIANKNYYGAAKMIFSDNPLGLTCGMVCPTSDLCVGGCNLYATEEGPINIGGLQQFATEVFKAMSIPQIRNPSLPPPEKMSEAYSAKIALFGAGPASISCASFLARLGYSDITIFEKQEYVGGLSTSEIPQFRLPYDVVNFEIELMKDLGVKIICGKSLSVNEMTLSTLKEKGYKAAFIGIGLPEPNKDAIFQGLTQDQGFYTSKDFLPLVAKGSKAGMCACHSPLPSIRGVVIVLGAGDTAFDCATSALRCGARRVFIVFRKGFVNIRAVPEEMELAKEEKCEFLPFLSPRKVIVKGGRIVAMQFVRTEQDETGKWNEDEDQMVHLKADVVISAFGSVLSDPKVKEALSPIKFNRWGLPEVDPETMQTSEAWVFAGGDVVGLANTTVESVNDGKQASWYIHKYVQSQYGASVSAKPELPLFYTPIDLVDISVEMAGLKFINPFGLASATPATSTSMIRRAFEAGWGFALTKTFSLDKDIVTNVSPRIIRGTTSGPMYGPGQSSFLNIELISEKTAAYWCQSVTELKADFPDNIVIASIMCSYNKNDWTELAKKSEDSGADALELNLSCPHGMGERGMGLACGQDPELVRNICRWVRQAVQIPFFAKLTPNVTDIVSIARAAKEGGANGVTATNTVSGLMGLKSDGTPWPAVGIAKRTTYGGVSGTAIRPIALRAVTSIARALPGFPILATGGIDSAESGLQFLHSGASVLQVCSAIQNQDFTVIEDYCTGLKALLYLKSIEELQDWDGQSPATVSHQKGKPVPRIAELMDKKLPSFGPYLEQRKKIIAENKIRLKEQNVAFSPLKRSCFIPKRPIPTIKDVIGKALQYLGTFGELSNVEQVVAMIDEEMCINCGKCYMTCNDSGYQAIQFDPETHLPTITDTCTGCTLCLSVCPIVDCIKMVSRTTPYEPKRGVPLSVNPVC

SEQ ID NO: 506 - DNA, 4407 bp, Homo sapiens
tttcgactcgcgctccggctgctgtcacttggctctctggctggagcttgaggacgcaaggagggtttgtcactggcagactcgagactgtaggcactgccatggcccctgtgctcagtaaggactcggcggacatcgagagtatcctggctttaaatcctcgaacacaaactcatgcaactctgtgttccacttcggccaagaaattagacaagaaacattggaaaagaaatcctgataagaactgctttaattgtgagaagctggagaataattttgatgacatcaagcacacgactcttggtgagcgaggagctctccgagaagcaatgagatgcctgaaatgtgcagatgccccgtgtcagaagagctgtccaactaatcttgatattaaatcattcatcacaagtattgcaaacaagaactattatggagctgctaagatgatattttctgacaacccacttggtctgacttgtggaatggtatgtccaacctctgatctatgtgtaggtggatgcaatttatatgccactgaagagggacccattaatattggtggattgcagcaatttgctactgaggtattcaaagcaatgagtatcccacagatcagaaatccttcgctgcctcccccagaaaaaatgtctgaagcctattctgcaaagattgctctttttggtgctgggcctgcaagtataagttgtgcttcctttttggctcgattggggtactctgacatcactatatttgaaaaacaagaatatgttggtggtttaagtacttctgaaattcctcagttccggctgccgtatgatgtagtgaattttgagattgagctaatgaaggaccttggtgtaaagataatttgcggtaaaagcctttcagtgaatgaaatgactcttagcactttgaaagaaaaaggctacaaagctgctttcattggaataggtttgccagaacccaataaagatgccatcttccaaggcctgacgcaggaccaggggttttatacatccaaagactttttgccacttgtagccaaaggcagtaaagcaggaatgtgcgcctgtcactctccattgccatcgatacggggagtcgtgattgtacttggagctggagacactgccttcgactgtgcaacatctgctctacgttgtggagctcgccgagtgttcatcgtcttcagaaaaggctttgttaatataagagctgtccctgaggagatggagcttgctaaggaagaaaagtgtgaatttctgccattcctgtccccacggaaggttatagtaaaaggtgggagaattgttgctatgcagtttgttcggacagagcaagatgaaactggaaaatggaatgaagatgaagatcagatggtccatctgaaagccgatgtggtcatcagtgcctttggttcagttctgagtgatcctaaagtaaaagaagccttgagccctataaaatttaacagatggggtctcccagaagtagatccagaaactatgcaaactagtgaagcatgggtatttgcaggtggtgatgtcgttggtttggctaacactacagtggaatcggtgaatgatggaaagcaagcttcttggtacattcacaaatacgtacagtcacaatatggagcttccgtttctgccaagcctgaactacccctcttttacactcctattgatctggtggacattagtgtagaaatggccggattgaagtttataaatccttttggtcttgctagcgcaactccagccaccagcacatcaatgattcgaagagcttttgaagctggatggggttttgccctcaccaaaactttctctcttgataaggacattgtgacaaatgtttcccccagaatcatccggggaaccacctctggccccatgtatggccctggacaaagctcctttctgaatattgagctcatcagtgagaaaacggctgcatattggtgtcaaagtgtcactgaactaaaggctgacttcccagacaacattgtgattgctagcattatgtgcagttacaataaaaatgactggacggaacttgccaagaagtctgaggattctggagcagatgccctggagttaaatttatcatgtccacatggcatgggagaaagaggaatgggcctggcctgtgggcaggatccagagctggtgcggaacatctgccgctgggttaggcaagctgttcagattcctttttttgccaagctgaccccaaatgtcactgatattgtgagcatcgcaagagctgcaaaggaaggtggtgccaatggcgttacagccaccaacactgtctcaggtctgatgggattaaaatctgatggcacaccttggccagcagtggggattgcaaagcgaactacatatggaggagtgtctgggacagcaatcagacctattgctttgagagctgtgacctccattgctcgtgctctgcctggatttcccattttggctactggtggaattgactctgctgaaagtggtcttcagtttctccatagtggtgcttccgtcctccaggtatgcagtgccattcagaatcaggatttcactgtgatcgaagactactgcactggcctcaaagccctgctttatctgaaaagcattgaagaactacaagactgggatggacagagtccagctactgtgagtcaccagaaagggaaaccagttccacgtatagctgaactcatggacaagaaactgccaagttttggaccttatctggaacagcgcaagaaaatcatagcagaaaacaagattagactgaaagaacaaaatgtagctttttcaccacttaagagaagctgttttatccccaaaaggcctattcctaccatcaaggatgtaataggaaaagcactgcagtaccttggaacatttggtgaattgagcaacgtagagcaagttgtggctatgattgatgaagaaatgtgtatcaactgtggtaaatgctacatgacctgtaatgattctggctaccaggctatacagtttgatccagaaacccacctgcccaccataaccgacacttgtacaggctgtactctgtgtctcagtgtttgccctattgtcgactgcatcaaaatggtttccaggacaacaccttatgaaccaaagagaggcgtacccttatctgtgaatccggtgtgttaaggtgatttgtgaaacagttgctgtgaactttcatgtcacctacatatgctgatctcttaaaatcatgatccttgtgttcagctctttccaaattaaaacaaatatacattttctaaataaaaatatgtaatttcaaaatacatttgtaagtgtaaaaaatgtctcatgtcaatgaccattcaattagtggcataaaatagaataattcttttctgaggatagtagttaaataactgtgtggcagttaattggatgttcactgccagttgtcttatgtgaaaaattaactttttgtgtggcaattagtgtgacagtttccaaattgccctatgctgtgctccatatttgatttctaattgtaagtgaaattaagcattttgaaacaaagtactctttaacatacaagaaaatgtatccaaggaaacattttatcaataaaaattacctttaattttaatgctgtttctaagaaaatgtagttagctccataaagtacaaatgaagaaagtcaaaaattatttgctatggcaggataagaaagcctaaaattgagtttgtggactttattaagtaaaatccccttcgctgaaattgcttatttttggtgttggatagaggatagggagaatatttactaactaaataccattcactactcatgcgtgagatgggtgtacaaactcatcctcttttaatggcatttctctttaaactatgttcctaaccaaatgagatgataggatagatcctggttaccactcttttactgtgcacatatgggccccggaattctttaatagtcaccttcatgattatagcaactaatgtttgaacaaagctcaaagtatgcaatgcttcattattcaagaatgaaaaatataatgttgataatatatattaagtgtgccaaatcagtttgactactctctgttttagtgtttatgtttaaaagaaatatattttttgttattattagataatatttttgtatttctctattttcataatcagtaaatagtgtcatataaactcatttatctcctcttcatggcatcttcaatatgaatctataagtagtaaatcagaaagtaacaatctatggcttatttctatgacaaattcaagagctagaaaaataaaatgtttcattatgcacttttagaaatgcatatttgccacaaaacctgtattactgaataatatcaaataaaatatcataaagcatttt

SEQ ID NO: 507 - protein, 234 aa, Homo sapiens
MCFPKVLSDDMKKLKARMVMLLPTSAQGLGAWVSACDTEDTVGHLGPWRDKDPALWCQLCLSSQHQAIERFYDKMQNAESGRGQVMSSLAELEDDFKEGYLETVAAYYEEQHPELTPLLEKERDGLRCRGNRSPVPDVEDPATEEPGESFCDKVMRWFQAMLQRLQTWWHGVLAWVKEKVVALVHAVQALWKQFQSFCCSLSELFMSSFQSYGAPRGDKEELTPQKCSEPQSSK

SEQ ID NO: 508 - DNA, 1168 bp, Homo sapiens
ggcacgaggccccagccagctgtcccgagtctggactttccctctgcccctccccactctcaggctggtggggtggggaaagcagcccattcctgggctcagagactcccaccccagctcagagggagcaggggcccagccagggacggaccctcattcctcccagggaccccagacctctgtctctctcgggccttggctccttgaacttttggccgccatgtgcttcccgaaggtcctctctgatgacatgaagaagctgaaggcccgaatggtaatgctcctccctacttctgctcaggggttgggggcctgggtctcagcgtgtgacactgaggacactgtgggacacctgggaccctggagggacaaggatccggccctttggtgccaactctgcctctcttcacagcaccaggccatagaaagattttatgataaaatgcaaaatgcagaatcaggacgtggacaggtgatgtcgagcctggcagagctggaggacgacttcaaagagggctacctggagacagtggcggcttattatgaggagcagcacccagagctcactcctctacttgaaaaagaaagagatggattacggtgccgaggcaacagatcccctgtcccggatgttgaggatcccgcaaccgaggagcctggggagagcttttgtgacaaggtcatgagatggttccaggccatgctgcagcggctgcagacctggtggcacggggttctggcctgggtgaaggagaaggtggtggccctggtccatgcagtgcaggccctctggaaacagttccagagtttctgctgctctctgtcagagctcttcatgtcctctttccagtcctacggagccccacggggggacaaggaggagctgacaccccagaagtgctctgaaccccaatcctcaaaatgaagatactgacaccacctttgccctccccgtcaccgcgcacccaccctgacccctccctcagctgtcctgtgccccgccctctcccgcacactcagtccccctgcctggcgttcctgccgcagctctgacctggtgctgtcgccctggcatcttaataaaacctgcttatacttccctggcaggggagataccctgaaaaaaaaaaaaaaaaaaaaaaaaaaaaaaaaaaaaaaaaaaaaaaaa

SEQ ID NO: 509 - protein, 451 aa, Homo sapiens
MHGYFGCNAAAEPGYSAFVGTPQICVTKMSTRNCQGMDSVIKPLDTIPEDKKVRVQRTQSTFDPFEKPANQVKRVHSENNACINFKTSSTGKESPKVRRHSSPSSPTSPKFGKADSYEKLEKLGEGSYATVYKGKSKVNGKLVALKVIRLQEEEGTPFTAIREASLLKGLKHANIVLLHDIIHTKETLTLVFEYVHTDLCQYMDKHPGGLHPDNVKLFLFQLLRGLSYIHQRYILHRDLKPQNLLISDTGELKLADFGLARAKSVPSHTYSNEVVTLWYRPPDVLLGSTEYSTCLDMWGVGCIFVEMIQGVAAFPGMKDIQDQLERIFLVLGTPNEDTWPGVHSLPHFKPERFTLYSSKNLRQAWNKLSYVNHAEDLASKLLQCSPKNRLSAQAALSHEYFSDLPPRLWELTDMSSIFTVPNVRLQPEAGESMRAFGKNNSYGKSLSNSKH

SEQ ID NO: 510 - DNA, 4957 bp, Homo sapiens
gcatccccttgattaaatgtttttcctcctatgcaatcaccattagctgtttggctcccattctgtattcttctgaagcagccctgcattgcaaatcaatatctttctgaaaagacagtgtgttgtgaattgccttgacagcatatgcacggttactttggctgcaatgctgctgcagagcccggttactctgccttcgtgggaactccacagatatgtgtcacaaagatgtctacacggaactgccagggaatggactcagtgatcaaacccctggacacaattcctgaggataaaaaagtcagagttcagaggacacagagcacttttgacccatttgagaaaccagctaatcaagtaaagagggtgcattctgagaacaatgcttgcattaactttaagacctcctccactggcaaagagtcacctaaagttaggcggcactccagccccagctcgccaacaagtcccaaatttggaaaagctgactcatatgaaaagctggaaaaactaggggaaggatcttatgctacagtatacaaagggaaaagcaaggtaaatgggaagttggtagctctgaaggtgatcaggctgcaggaagaagaagggacacctttcacagctatcagggaagcttctcttttaaaaggactaaaacatgctaacatagtgctacttcatgacatcatccataccaaggagacgctgacacttgtgtttgaatatgtgcacactgatttatgtcagtacatggacaagcaccctggggggctgcatccagataatgtgaagttgtttttatttcagttgctgcgaggtctgtcttacatccaccagcgttatattttgcacagagacctgaaaccacagaaccttctgatcagtgacacgggggagttaaagctggcagatttcggtcttgcaagagcaaaatccgtccctagccacacatactccaacgaagtggttaccttgtggtacagacctccagatgtccttctaggctcaacagaatattccacctgccttgacatgtggggagtaggttgcatctttgttgaaatgatccaaggagttgctgcttttccaggaatgaaagacattcaggatcaacttgaacgaatatttctggttcttggaacaccaaatgaggacacatggcctggagttcattctttaccacattttaagccagaacgctttaccctgtacagctctaaaaaccttagacaagcatggaataagctcagctatgtgaaccatgcagaggacctggcctccaagctcctacaatgttccccaaagaacagactgtcggcacaggctgccttgagccacgagtattttagtgacctgccgccacggctatgggaactcaccgacatgtcttctatttttactgtcccaaatgtgagattgcaaccagaagctggagaaagcatgcgggcctttgggaaaaacaatagttatggcaaaagtctatcaaacagcaagcactgacaagcagcacattctcaagagcacacaggattaagttgtcatcattctgggaagaaaaaaaaaacattaatgaagaggccaataatatgaagggaatcatggatcagttttctttcgctccctgtggtggatttcacttacaagaaaattgaagctggcaagaccctgttttctctgcaatttatttaaaaccttgcacgcatttggataccttgtgatttccaagaactacgtgaagattaagctttgcttactgatacatggcatgtattcttttcagtcttttgtgtttgattttgtttgatttccctctgcagcacagcgtctctgtaaaggtttttatgctttcaccagccatgtcttaaatacattaagacaacacatttggtgttcacacttcttcagtaatgtctgaacttgaaagccacagagtggcataaaacaatgtgtgttttctttgagagcagtgcacattttgcaaccactaggaaggaaattttctgctaaagcaaacccctgttctctgacttgacaacttggccccggactgtggggccccacctgttgcttaccttttgaggtaattttgcaaatgtggtttttttacttggaaataactgcacatttatatataggatattggactctgcttagcattttcaagccacatagcatgactgttttttgaataggttggaattgaaaaaacaattatcaaacgttaagaacaaagacagggataaattgcttacatttcaacctctagagattgaggtaactttttgtgtctgggtcttgtcaacatctaatttttttccatccattctgttacactttgtattttctaactggagaaaagagtgaggaacagaatgttttaaatctggtgcaaaagaactatatctgctggatgagccttgaaagcagtcttggcctgttagggcttacaaagtaaattacaaagtgatccagttcaaagtttgcttagttacaacaaagcacctttaaaaaaaatacattttaaaaaaacattccaagccaattggaagacatcattgggttcttactttaagacatctcctggaataactgttcaaatgcaggttttagaaacaatgcaggaatcttgctttaaagatgaaaaagggaatgggccagcttcccttactcaaggagttgagggaccttggaggatgaaggcgagtatgtgacactggagaaaagtggaccaggcatgtcttttgctttgatctggagggagggctgcctgatgcaggccggctcccagtggggcaggcctcgctgcagaatgcccagtagtactgcggccaaggggacagttaggagacttcatctaaagcatgaaacctagctcctctacacacaaattcctatggaaatacctttgtgtacagtgtcttacattttcctattagtcagaaagaaggagagaatgagtgagtgcttgaaatgtgtcatactgttttaggatcaagactaggaattaggagccaggttgacaaggactttttctgagagttgggtgagggtaaagcttttctataatcaagctcaatacaccaaggaaactggatccagaattcctaaactttaaaatggtactgtctgcggagtggagtatggatggttatgtcaaagtcatagttcatcctatccagatgtagcattcatggtaaacttttaagtgctaagcaaggaattatttactgattggttttaaagagagcagaaaacacccaagtgtagaatgtctactgtttgctacctagaaatcttttccattcctctttcatacattccaacccactggaagtctttagaggtattttgatttaaagtatacttaaattaggatttcttaaagaaaacatagggagaaaactttacatgcaattaaaaatggactttcctgtgatttgtttttaatcattcatttggagaagaggcatgacctttgtatttcactaagtttaaagcaagagcaactgatgattaaatgttgctttttaataaggtttttaacttgaaaatttgaaaatatttaatgttgaaagacttcaattagggctattagagttatatctccctgtcgtaggcagcttcttcggagaagtgaaatataacattactcagtggacggagaagtctgttttgttacagagacatgcctctcagaaggtcaggaggttttgagtacctatccttgccacccatacaggaaatccaaagtttggtgtctctctctctctctgtctctttctttctctttctccccccaaacccctctcactccctccctccctctctccttcccctatttgcaatcatattctccctctgcttcttttctcttctgccctccttgtgggcagtcatgaaaatcaattcagactgtgttcattagcagatttattattctattgagaaagcactggaatgttttgtgagattatttttatatgaaggaatagcctgaactcaaacagatggtaagaatagtacaaacaccttagcacatcactgcacacacagtattctgaaaggagatttgacacttaattcccattttcttaaaataacagttttgttgacttaaaaatatgagatacataggatgtgaaaaaaaatgtttgcagtactcagcaaaaaatagggtacataaagcagggtggctgtccatccactgattctggggtgagaagcgatttctacctcgcaagagtgactagaaagtttctaggagcacctccaggcttgcaaagaaagtgaggcctcttggtatcctttcctcagtgtgtatatgacagccagtataatcaataccctaggttatgcgtctatatgatactcatctgtgaatattattggttttgtaatctttgttatataagaggatgtttaggctgtatatactggggtagattattgcctgccccttatacataggaatatgctgcataattgcgcataacttccatctcccttactggcttgtaggcagaggaaactgtatatgttactgccttgtacttttctcatacaccaaaaacacaccaaaaaaatcaataaaataagcaatcttctattctcattccttttcccacagcagcatattttagaggcacatacaaaacctacattctctagttgggagtggatttttaaagttttccttttatcttttatttttttttttgtatgatgcactgagatgtgtactttctaacaggggattggtacctaagaaacgtggtagcattattcagaaaactattatactttcaaatgacacatagtaaggagaatggaataatacatgttgcatatttgttaccagttgtaatttgtctgtattatgaaagatgtaatggtttgtcagctgtcactgttgttttcttgtaacatgatatggaataaagtatagcagaatctccgt

SEQ ID NO: 511 - protein, 205 aa, Homo sapiens
MCKGLAGLPASCLRSAKDMKHRLGFLLQKSDSCEHNSSHNKKDKVVICQRVSQEEVKKWAESLENLISHECGLAAFKAFLKSEYSEENIDFWISCEEYKKIKSPSKLSPKAKKIYNEFISVQATKEVNLDSCTREETSRNMLEPTITCFDEAQKKIFNLMEKDSYRRFLKSRFYLDLVNPSSCGAEKQKGAKSSADCASLVPQCA

SEQ ID NO: 512 - DNA, 753 bp, Homo sapiens
gcaacatagcacgttcgcaaagtacgctcaaagccgaagccacagctcctcctgccgcatttctttcctgcttgcgaattccaagctgttaaataagatgtgcaaagggcttgcaggtctgccggcttcttgcttgaggagtgcaaaagatatgaaacatcggctaggtttcctgctgcaaaaatctgattcctgtgaacacaattcttcccacaacaagaaggacaaagtggttatttgccagagagtgagccaagaggaagtcaagaaatgggctgaatcactggaaaacctgattagtcatgaatgtgggctggcagctttcaaagctttcttgaagtctgaatatagtgaggagaatattgacttctggatcagctgtgaagagtacaagaaaatcaaatcaccatctaaactaagtcccaaggccaaaaagatctataatgaattcatctcagtccaggcaaccaaagaggtgaacctggattcttgcaccagggaagagacaagccggaacatgctagagcctacaataacctgctttgatgaggcccagaagaagattttcaacctgatggagaaggattcctaccgccgcttcctcaagtctcgattctatcttgatttggtcaacccgtccagctgtggggcagaaaagcagaaaggagccaagagttcagcagactgtgcttccctggtccctcagtgtgcctaattctcacctgaagggagagggatgaaaagccgaatctg

SEQ ID NO: 513 - protein, 1395 aa, Homo sapiens
MRIPVDASTSRRFTPPSTALSPGKMSEALPLGAPDAGAALAGKLRSGDRSMVEVLADHPGELVRTDSPNFLCSVLPTHWRCNKTLPIAFKVVALGDVPDGTLVTVMAGNDENYSAELRNATAAMKNQVARFNDLRFVGRSGRGKSFTLTITVFTNPPQVATYHRAIKITVDGPREPRNNECVYGNYPEIPLEEMPDADGVASTPSLNIQEPCSPATSSEAFTPKEGSPYKAPIYIPDDIPIPAEFELRESNMPGAGLGIWTKRKIEVGEKFGPYVGEQRSNLKDPSYGWEILDEFYNVKFCIDASQPDVGSWLKYIRFAGCYDQHNLVACQINDQIFYRVVADIAPGEELLLFMKSEDYPHETMAPDIHEERQYRCEDCDQLFESKAELADHQKFPCSTPHSAFSMVEEDFQQKLESENDLQEIHTIQECKECDQVFPDLQSLEKHMLSHTEEREYKCDQCPKAFNWKSNLIRHQMSHDSGKHYECENCAKVFTDPSNLQRHIRSQHVGARAHACPECGKTFATSSGLKQHKHIHSSVKPFICEVCHKSYTQFSNLCRHKRMHADCRTQIKCKDCGQMFSTTSSLNKHRRFCEGKNHFAAGGFFGQGISLPGTPAMDKTSMVNMSHANPGLADYFGANRHPAGLTFPTAPGFSFSFPGLFPSGLYHRPPLIPASSPVKGLSSTEQTNKSQSPLMTHPQILPATQDILKALSKHPSVGDNKPVELQPERSSEERPFEKISDQSESSDLDDVSTPSGSDLETTSGSDLESDIESDKEKFKENGKMFKDKVSPLQNLASINNKKEYSNHSIFSPSLEEQTAVSGAVNDSIKAIASIAEKYFGSTGLVGLQDKKVGALPYPSMFPLPFFPAFSQSMYPFPDRDLRSLPLKMEPQSPGEVKKLQKGSSESPFDLTTKRKDEKPLTPVPSKPPVTPATSQDQPLDLSMGSRSRASGTKLTEPRKNHVFGGKKGSNVESRPASDGSLQHARPTPFFMDPIYRVEKRKLTDPLEALKEKYLRPSPGFLFHPQMSAIENMAEKLESFSALKPEASELLQSVPSMFNFRAPPNALPENLLRKGKERYTCRYCGKIFPRSANLTRHLRTHTGEQPYRCKYCDRSFSISSNLQRHVRNIHNKEKPFKCHLCDRCFGQQTNLDRHLKKHENGNMSGTATSSPHSELESTGAILDDKEDAYFTEIRNFIGNSNHGSQSPRNVEERMNGSHFKDEKALVTSQNSDLLDDEEVEDEVLLDEEDEDNDITGKTGKEPVTSNLHEGNPEDDYEETSALEMSCKTSPVRYKEEEYKSGLSALDHIRHFTDSLKMRKMEDNQYSEAELSSFSTSHVPEELKQPLHRKSKSQAYAMMLSLSDKESLHSTSHSSSNVWHSMARAAAESSAIQSISHV

SEQ ID NO: 514 - DNA, 5938 bp, Homo sapiens
tttccaggcactctcattcatagagccagcgggcgcgggcgggacgggcgccccgcggccggacccagccagggcaccacgctgcccggccctgcgccgccaggcacttctttccggggctcctagggacgccagaaggaagtcaacctctgctgcttctccttggcctgcgttggaccttcctttttttgttgtttttttttgtttttcccctttcttccttttgaattaactggcttcttggctggatgttttcaacttctttcctggctgcgaactttttccccaattgttttccttttacaacagggggagaaagtgctctgtggtccgaggcgagccgtgaagttgcgtgtgcgtggcagtgtgcgtggcaggatgtgcgtgcgtgtgtaacccgagccgcccgatctgtttcgatctgcgccgcggagccctccctcaaggcccgctccacctgcttggcggttacgcggcgctcgtgggtgttcgtgccttcggagcagctaaccggcgggtgctgggcgacggtggaggagtatcgttctcgctgcttgcccgagtcagggctgagtcaccccagctgatgtagacagtggctgccttccgaagagtgcgtgtttgcatgtgtgtgactctgcggctgctcaactcccaacaaaccagaggaccagccacaaacttaaccaacatccccaaacccgagttcacagatgtgggagagctgtagaaccctgagtgtcatcgactgggccttcttatgattgttgttttaagattagctgaagatctctgaaacgctgaattttctgcactgagcgtttgacagaattcattgagagaacagagaacatgacaagtacttctagctcagcactgctccaactactgaagctgattttcaaggctacttaaaaaaatctgcagcgtacattaatggatttctgttgtgtttaaattctccacagattgtattgtaaatattttatgaagtagagcatatgtatatatttatatatacgtgcacatacattagtagcactacctttggaagtctcagctcttgcttttcgggactgaagccagttttgcatgataaaagtggccttgttacgggagataattgtgttctgttgggactttagacaaaactcacctgcaaaaaactgacaggcattaactactggaacttccaaataatgtgtttgctgatcgttttactcttcgcataaatattttaggaagtgtatgagaattttgccttcaggaacttttctaacagccaaagacagaacttaacctctgcaagcaagattcgtggaagatagtctccactttttaatgcactaagcaatcggttgctaggagcccatcctgggtcagaggccgatccgcagaaccagaacgttttcccctcctggactgttagtaacttagtctccctcctcccctaaccacccccgcccccccccaccccccgcagtaataaaggcccctgaacgtgtatgttggtctcccgggagctgcttgctgaagatccgcgcccctgtcgccgtctggtaggagctgtttgcagggtcctaactcaatcggcttgttgtgatgcgtatccccgtagatgccagcacgagccgccgcttcacgccgccttccaccgcgctgagcccaggcaagatgagcgaggcgttgccgctgggcgccccggacgccggcgctgccctggccggcaagctgaggagcggcgaccgcagcatggtggaggtgctggccgaccacccgggcgagctggtgcgcaccgacagccccaacttcctctgctccgtgctgcctacgcactggcgctgcaacaagaccctgcccatcgctttcaaggtggtggccctaggggatgttccagatggcactctggtcactgtgatggctggcaatgatgaaaactactcggctgagctgagaaatgctaccgcagccatgaagaaccaggttgcaagatttaatgacctcaggtttgtcggtcgaagtggaagagggaaaagcttcactctgaccatcactgtcttcacaaacccaccgcaagtcgccacctaccacagagccatcaaaatcacagtggatgggccccgagaacctcgaaataatgagtgtgtatatggcaactaccctgaaatacctttggaagaaatgccagatgcagatggagtagccagcactccctccctcaatattcaagagccatgctctcctgccacatccagtgaagcattcactccaaaggagggttctccttacaaagcccccatctacatccctgatgatatccccattcctgctgagtttgaacttcgagagtcaaatatgcctggggcaggactaggaatatggaccaaaaggaagatcgaagtaggtgaaaagtttgggccttatgtgggagagcagaggtcaaacctgaaagaccccagttatggatgggagatcttagacgaattttacaatgtgaagttctgcatagatgccagtcaaccagatgttggaagctggctcaagtacattagattcgctggctgttatgatcagcacaaccttgttgcatgccagataaatgatcagatattctatagagtagttgcagacattgcgccgggagaggagcttctgctgttcatgaagagcgaagactatccccatgaaactatggcgccggatatccacgaagaacggcaatatcgctgcgaagactgtgaccagctctttgaatctaaggctgaactagcagatcaccaaaagtttccatgcagtactcctcactcagcattttcaatggttgaagaggactttcagcaaaaactcgaaagcgagaatgatctccaagagatacacacgatccaggagtgtaaggaatgtgaccaagtttttcctgatttgcaaagcctggagaaacacatgctgtcacatactgaagagagggaatacaagtgtgatcagtgtcccaaggcatttaactggaagtccaatttaattcgccaccagatgtcacatgacagtggaaagcactatgaatgtgaaaactgtgccaaggttttcacggaccctagcaaccttcagcggcacattcgctctcagcatgtcggtgcccgggcccatgcatgcccggagtgtggcaaaacgtttgccacttcgtcgggcctcaaacaacacaagcacatccacagcagtgtgaagccctttatctgtgaggtctgccataaatcctatactcagttttcaaacctttgccgtcataagcgcatgcatgctgattgcagaacccaaatcaagtgcaaagactgtggacaaatgttcagcactacgtcttccttaaataaacacaggaggttttgtgagggcaagaaccattttgcggcaggtggattttttggccaaggcatttcacttcctggaaccccagctatggataaaacgtccatggttaatatgagtcatgccaacccgggccttgctgactattttggcgccaataggcatcctgctggtcttacctttccaacagctcctggattttcttttagcttccctggtctgtttccttccggcttgtaccacaggcctcctttgatacctgctagttctcctgttaaaggactatcaagtactgaacagacaaacaaaagtcaaagtcccctcatgacacatcctcagatactgccagctacacaggatattttgaaggcactatctaaacacccatctgtaggggacaataagccagtggagctccagcccgagaggtcctctgaagagaggccctttgagaaaatcagtgaccagtcagagagtagtgaccttgatgatgtcagtacaccaagtggcagtgacctggaaacaacctcgggctctgatctggaaagtgacattgaaagtgataaagagaaatttaaagaaaatggtaaaatgttcaaagacaaagtaagccctcttcagaatctggcttcaataaataataagaaagaatacagcaatcattccattttctcaccatctttagaggagcagactgcggtgtcaggagctgtgaatgattctataaaggctattgcttctattgctgaaaaatactttggttcaacaggactggtggggctgcaagacaaaaaagttggagctttaccttacccttccatgtttcccctcccattttttccagcattctctcaatcaatgtacccatttcctgatagagacttgagatcgttacctttgaaaatggaaccccaatcaccaggtgaagtaaagaaactgcagaagggcagctctgagtccccctttgatctcaccactaagcgaaaggatgagaagcccttgactccagtcccctccaagcctccagtgacacctgccacaagccaagaccagcccctggatctaagtatgggcagtaggagtagagccagtgggacaaagctgactgagcctcgaaaaaaccacgtgtttgggggaaaaaaaggaagcaacgtcgaatcaagacctgcttcagatggttccttgcagcatgcaagacccactcctttctttatggaccctatttacagagtagagaaaagaaaactaactgacccacttgaagctttaaaagagaaatacttgaggccttctccaggattcttgtttcacccacaaatgtcagctattgaaaacatggcagaaaagctagagagcttcagtgccctgaaacctgaggccagtgagctcttacagtcagtgccctctatgttcaacttcagggcgcctcccaatgccctgccagagaaccttctgcggaagggaaaggagcgctatacctgcagatactgtggcaagatttttccaaggtctgcaaacctaacacggcacttgagaacccacacaggagagcagccttacagatgcaaatactgtgacagatcatttagcatatcttctaacttgcaaaggcatgttcgcaacatccacaataaagagaagccatttaagtgtcacttatgtgataggtgttttggtcaacaaaccaatttagacagacacctaaagaaacatgagaatgggaacatgtccggtacagcaacatcgtcgcctcattctgaactggaaagtacaggtgcgattctggatgacaaagaagatgcttacttcacagaaattcgaaatttcattgggaacagcaaccatggcagccaatctcccaggaatgtggaggagagaatgaatggcagtcattttaaagatgaaaaggctttggtgaccagtcaaaattcagacttgctggatgatgaagaagttgaagatgaggtgttgttagatgaggaggatgaagacaatgatattactggaaaaacaggaaaggaaccagtgacaagtaatttacatgaaggaaaccctgaggatgactatgaagaaaccagtgccctggagatgagttgcaagacatccccagtgaggtataaagaggaagaatataaaagtggactttctgctctagatcatataaggcacttcacagatagcctcaaaatgaggaaaatggaagataatcaatattctgaagctgagctgtcttcttttagtacttcccatgtgccagaggaacttaagcagccgttacacagaaagtccaaatcgcaggcatatgctatgatgctgtcactgtctgacaaggagtccctccattctacatcccacagttcttccaacgtgtggcacagtatggccagggctgcggcggaatccagtgctatccagtccataagccacgtatgacgttatcaaggttgaccagagtgggaccaagtccaacagtagcatggctctttcatataggactatttacaagactgctgagcagaatgccttataaacctgcagggtcactcatctaaagtctagtgaccttaaactgaatgattta

SEQ ID NO: 515 - protein, 477 aa, Homo sapiens
MANMQGLVERLERAVSRLESLSAESHRPPGNCGEVNGVIAGVAPSVEAFDKLMDSMVAEFLKNSRILAGDVETHAEMVHSAFQAQRAFLLMASQYQQPHENDVAALLKPISEKIQEIQTFRERNRGSNMFNHLSAVSESIPALGWIAVSPKPGPYVKEMNDAATFYTNRVLKDYKHSDLRHVDWVKSYLNIWSELQAYIKEHHTTGLTWSKTGPVASTVSAFSVLSSGPGLPPPPPPLPPPGPPPLFENEGKKEESSPSRSALFAQLNQGEAITKGLRHVTDDQKTYKNPSLRAQGGQTQSPTKSHTPSPTSPKSYPSQKHAPVLELEGKKWRVEYQEDRNDLVISETELKQVAYIFKCEKSTIQIKGKVNSIIIDNCKKLGLVFDNVVGIVEVINSQDIQIQVMGRVPTISINKTEGCHIYLSEDALDCEIVSAKSSEMNILIPQDGDYREFPIPEQFKTAWDGSKLITEPAEIMA

SEQ ID NO: 516 - DNA, 1517 bp, Homo sapiens
attctttggggaggcaactaggatggtgtggccgaccacggatttgcattgccgaggacgggaccccagggcagcgaagcagaatggccaacatgcagggactggtggaaagactggaacgagctgtcagccgcctggagtcgctgtctgcagagtcccacaggccccctgggaactgcggggaagtcaatggtgtcattgcaggtgtggcaccctccgtggaagcctttgacaagctgatggacagtatggtggccgagtttttaaagaacagtaggatccttgctggggacgtggagacccatgcagaaatggtgcacagtgctttccaggcccagcgggctttccttctgatggcctctcagtaccaacaaccccacgagaatgacgtggccgcacttctgaaacccatatcggaaaagattcaggaaatccaaactttcagagagagaaaccgggggagtaacatgtttaatcatctttcggccgtcagcgaaagcatccctgcccttggatggatagctgtgtctcccaaacctggtccttatgtcaaggagatgaatgacgctgccaccttttacactaacagggtcttaaaggactacaaacacagtgatttgcgtcatgtggattgggtgaagtcatatttgaacatttggagtgaacttcaagcatacatcaaggaacaccacaccacgggcctcacatggagcaaaacaggtcctgtagcatccacagtatcagcgttttctgtcctctcctctgggcctggccttcctccaccccctcctcctctgcctcctccagggccacctccacttttcgagaatgaaggcaaaaaagaggaatcttctccttcacgctcagctttatttgcccaacttaaccagggagaagcaattacaaaagggctccgccatgtcacagatgaccagaagacatacaaaaatcccagcctgcgggctcaaggagggcaaactcaatctcccaccaaaagtcacactccaagtcccacatctcctaaatcttatccttctcaaaaacatgccccagtgttggagttggaaggaaagaaatggagagtggagtaccaagaggacaggaatgaccttgtgatttcagagactgagctgaaacaagtggcttacattttcaaatgcgaaaaatcaactattcagataaaagggaaagtaaactccattataattgacaactgtaagaaactcggcctggtgtttgacaatgtggtgggcattgtggaagtgatcaactcccaggacattcaaatccaggtaatggggagagtgccaacaatttccattaataagacagaaggttgccacatatacctcagtgaagatgcattagactgtgagatcgtgagcgccaagtcatctgaaatgaacatacttatccctcaggatggtgattatagagaatttcccattcctgaacagttcaagacagcatgggatggatccaagttaatcactgaacctgcagaaattatggcctaa

SEQ ID NO: 517 - protein, 449 aa, Homo sapiens
MMKTLLLFVGLLLTWESGQVLGDQTVSDNELQEMSNQGSKYVNKEIQNAVNGVKQIKTLIEKTNEERKTLLSNLEEAKKKKEDALNETRESETKLKELPGVCNETMMALWEECKPCLKQTCMKFYARVCRSGSGLVGRQLEEFLNQSSPFYFWMNGDRIDSLLENDRQQTHMLDVMQDHFSRASSIIDELFQDRFFTREPQDTYHYLPFSLPHRRPHFFFPKSRIVRSLMPFSPYEPLNFHAMFQPFLEMIHEAQQAMDIHFHSPAFQHPPTEFIREGDDDRTVCREIRHNSTGCLRMKDQCDKCREILSVDCSTNNPSQAKLRRELDESLQVAERLTRKYNELLKSYQWKMLNTSSLLEQLNEQFNWVSRLANLTQGEDQYYLRVTTVASHTSDSDVPSGVTEVVVKLFDSDPITVTVPVEVSRKNPKFMETVAEKALQEYRKKHREE

SEQ ID NO: 518 - DNA, 1676 bp, Homo sapiens
gaattccgccgctgaccgaggcgtgcaaagactccagaattggaggcatgatgaagactctgctgctgtttgtggggctgctgctgacctgggagagtgggcaggtcctgggggaccagacggtctcagacaatgagctccaggaaatgtccaatcagggaagtaagtacgtcaataaggaaattcaaaatgctgtcaacggggtgaaacagataaagactctcatagaaaaaacaaacgaagagcgcaagacactgctcagcaacctagaagaagccaagaagaagaaagaggatgccctaaatgagaccagggaatcagagacaaagctgaaggagctcccaggagtgtgcaatgagaccatgatggccctctgggaagagtgtaagccctgcctgaaacagacctgcatgaagttctacgcacgcgtctgcagaagtggctcaggcctggttggccgccagcttgaggagttcctgaaccagagctcgcccttctacttctggatgaatggtgaccgcatcgactccctgctggagaacgaccggcagcagacgcacatgctggatgtcatgcaggaccacttcagccgcgcgtccagcatcatagacgagctcttccaggacaggttcttcacccgggagccccaggatacctaccactacctgcccttcagcctgccccaccggaggcctcacttcttctttcccaagtcccgcatcgtccgcagcttgatgcccttctctccgtacgagcccctgaacttccacgccatgttccagcccttccttgagatgatacacgaggctcagcaggccatggacatccacttccacagcccggccttccagcacccgccaacagaattcatacgagaaggcgacgatgaccggactgtgtgccgggagatccgccacaactccacgggctgcctgcggatgaaggaccagtgtgacaagtgccgggagatcttgtctgtggactgttccaccaacaacccctcccaggctaagctgcggcgggagctcgacgaatccctccaggtcgctgagaggttgaccaggaaatacaacgagctgctaaagtcctaccagtggaagatgctcaacacctcctccttgctggagcagctgaacgagcagtttaactgggtgtcccggctggcaaacctcacgcaaggcgaagaccagtactatctgcgggtcaccacggtggcttcccacacttctgactcggacgttccttccggtgtcactgaggtggtcgtgaagctctttgactctgatcccatcactgtgacggtccctgtagaagtctccaggaagaaccctaaatttatggagaccgtggcggagaaagcgctgcaggaataccgcaaaaagcaccgggaggagtgagatgtggatgttgcttttgcaccttacgggggcatcttgagtccagctccccccaagatgagctgcagccccccagagagagctctgcacgtcaccaagtaaccaggccccagcctccaggcccccaactccgcccagcctctccccgctctggatcctgcactctaacactcgactctgctgctcatgggaagaacagaattgctcctgcatgcaactaattcaataaaactgtcttgtgagctgaaaaaaaaaaaaaaaaaaaaaaaaaaggaattc

SEQ ID NO: 519 - protein, 192 aa, Homo sapiens
MGNISSNISAFQSLHIVMLGLDSAGKTTVLYRLKFNEFVNTVPTIGFNTEKIKLSNGTAKGISCHFWDVGGQEKLRPLWKSYSRCTDGIIYVVDSVDVDRLEEAKTELHKVTKFAENQGTPLLVIANKQDLPKSLPVAEIEKQLALHELIPATTYHVQPACAIIGEGLTEGMDKLYEMILKRRKSLKQKKKR

SEQ ID NO: 520 - DNA, 625 bp, Homo sapiens
cgcagccaggagccatgggcaacatctcctctaacatctcggccttccagtccctgcatatcgtcatgttgggcttggactcggccggcaagaccacggtgctctaccggctcaagttcaacgagttcgtgaacacggtgcccaccatcggcttcaacaccgagaagatcaagctgagcaacggcacggccaagggcatcagctgccacttctgggacgtgggcggccaggagaagctgcggccgctgtggaagtcctacagccgctgcacggacggcatcatctacgtggtggactcggtggacgtggaccggctggaggaggccaagacggagctgcacaaggtgaccaagttcgccgagaaccagggcacgccgctgctggtcatcgccaacaagcaggacctgcccaagtcgctgccggtggcagagattgagaagcagctggcgctgcacgagcttatcccggccaccacctatcacgtccagccggcgtgcgccatcatcggcgagggcctcaccgagggcatggacaagctctatgagatgatcctgaaacgcaggaagtccctcaagcagaagaagaagcggtaatgcgcccggagcgaccggggagcgagcgagtg

SEQ ID NO: 521 - protein, 330 aa, Homo sapiens
MWLLVSVILISRISSVGGEATFCDFPKINHGILYDEEKYKPFSQVPTGEVFYYSCEYNFVSPSKSFWTRITCTEEGWSPTPKCLRLCFFPFVENGHSESSGQTHLEGDTVQIICNTGYRLQNNENNISCVERGWSTPPKCRSTDTSCVNPPTVQNAYIVSRQMSKYPSGERVRYQCRSPYEMFGDEEVMCLNGNWTEPPQCKDSTGKCGPPPPIDNGDITSFPLSVYAPASSVEYQCQNLYQLEGNKRITCRNGQWSEPPKCLHPCVISREIMENYNIALRWTAKQKLYLRTGESAEFVCKRGYRLSSRSHTLRTTCWDGKLEYPTCAKR

SEQ ID NO: 522 - DNA, 1266 bp, Homo sapiens
tgttaatgaaagcagattcaaagcaacaccaccaccactgaagtatttttagttatataagattggaactaccaagcatgtggctcctggtcagtgtaattctaatctcacggatatcctctgttgggggagaagcaacattttgtgattttccaaaaataaaccatggaattctatatgatgaagaaaaatataagccattttcccaggttcctacaggggaagttttctattactcctgtgaatataattttgtgtctccttcaaaatcattttggactcgcataacatgcacagaagaaggatggtcaccaacaccaaagtgtctcagactgtgtttctttccttttgtggaaaatggtcattctgaatcttcaggacaaacacatctggaaggtgatactgtgcaaattatttgcaacacaggatacagacttcaaaacaatgagaacaacatttcatgtgtagaacggggctggtccacccctcccaaatgcaggtccactgacacttcctgtgtgaatccgcccacagtacaaaatgcttatatagtgtcgagacagatgagtaaatatccatctggtgagagagtacgttatcaatgtaggagcccttatgaaatgtttggggatgaagaagtgatgtgtttaaatggaaactggacggaaccacctcaatgcaaagattctacgggaaaatgtgggccccctccacctattgacaatggggacattacttcattcccgttgtcagtatatgctccagcttcatcagttgagtaccaatgccagaacttgtatcaacttgagggtaacaagcgaataacatgtagaaatggacaatggtcagaaccaccaaaatgcttacatccgtgtgtaatatcccgagaaattatggaaaattataacatagcattaaggtggacagccaaacagaagctttatttgagaacaggtgaatcagctgaatttgtgtgtaaacggggatatcgtctttcatcacgttctcacacattgcgaacaacatgttgggatgggaaactggagtatccaacttgtgcaaaaagatagaatcaatcataaaatgcacacctttattcagaactttagtattaaatcagttcttaatttaatttttaagtattgttttactcctttttattcatacgtaaaattttggattaatttgtgaaaatgtaattataagctgagaccggtggctctcttcttaaaagcaccatattaaaacttggaaaactggaaaact

SEQ ID NO: 523 - protein, 709 aa, Homo sapiens
MAEVEDQAARDMKRLEEKDKERKNVKGIRDDIEEEDDQEAYFRYMAENPTAGVVQEEEEDNLEYDSDGNPIAPTKKIIDPLPPIDHSEIDYPPFEKNFYNEHEEITNLTPQQLIDLRHKLNLRVSGAAPPRPGSSFAHFGFDEQLMHQIRKSEYTQPTPIQCQGVPVALSGRDMIGIAKTGSGKTAAFIWPMLIHIMDQKELEPGDGPIAVIVCPTRELCQQIHAECKRFGKAYNLRSVAVYGGGSMWEQAKALQEGAEIVVCTPGRLIDHVKKKATNLQRVSYLVFDEADRMFDMGFEYQVRSIASHVRPDRQTLLFSATFRKKIEKLARDILIDPIRVVQGDIGEANEDVTQIVEILHSGPSKWNWLTRRLVEFTSSGSVLLFVTKKANAEELANNLKQEGHNLGLLHGDMDQSERNKVISDFKKKDIPVLVATDVAARGLDIPSIKTVINYDVARDIDTHTHRIGRTGRAGEKGVAYTLLTPKDSNFAGDLVRNLEGANQHVSKELLDLAMQNAWFRKSRFKGGKGKKLNIGGGGLGYRERPGLGSENMDRGNNNVMSNYEAYKPSTGAMGDRLTAMKAAFQSQYKSHFVAASLSNQKAGSSAAGASGWTSAGSLNSVPTNSAQQGHNSPDSPVTSAAKGIPGFGNTGNISGAPVTYPSAGAQGVNNTASGNNSREGTGGSNGKRERYTENRGSSPSQSRRDWQSA

SEQ ID NO: 524 - DNA, 3347 bp, Homo sapiens
atcccttggaggcattcatggctgaagtggaggatcaggcagctagagacatgaagaggcttgaagaaaaggacaaggaaagaaaaaacgtaaagggtattcgagatgacattgaagaggaagatgaccaagaagcttattttcgatacatggcagaaaacccaactgctggtgtggttcaggaggaagaggaagacaatctagaatatgatagtgacggaaatccaattgcacctaccaaaaaaatcattgatcctcttccccccattgatcattcagagattgactatccaccatttgaaaaaaacttttacaatgagcatgaagagataaccaacctcactccacagcagttaatagatctccggcataagctcaatcttcgggtctctggtgctgcacctcctagaccaggaagtagctttgctcattttgggtttgacgaacaacttatgcaccagattcggaaatctgaatacacacagcccactccaatacagtgccagggtgtgcctgtggcattaagtggtagagacatgattggtattgccaaaacaggtagtgggaaaactgcagccttcatttggcccatgttgattcatataatggaccagaaggagttggaaccaggtgatggaccaattgcagtgattgtgtgtcctaccagggagctttgccagcagatccatgcagaatgtaagcggtttggaaaagcatataatcttcgatcagtggccgtatatggaggagggagtatgtgggagcaggccaaggcccttcaggagggggcagagattgttgtgtgtaccccaggtcgactgatagatcatgtgaaaaagaaagctaccaatcttcaaagagtctcttaccttgtgtttgatgaagcagatcgaatgtttgacatgggatttgagtaccaagttcgatccatagcaagtcatgttcgtcctgacaggcagactctcttatttagtgcaacttttcggaagaagattgaaaagttggccagagacatcctgatcgaccctattcgagtggtgcagggagatattggagaggcaaatgaagatgtgacacagattgtggagattctccattctggacctagtaaatggaactggcttacccggcgtctggtagaatttacctcttcagggagtgtcctcctctttgttactaaaaaagccaatgctgaagagctagcgaataaccttaaacaggagggtcataatcttgggctgctccatggggatatggatcagagtgagagaaacaaggtcatttcagactttaagaaaaaggacatcccagtcctggtggccacagatgttgcagcccgtggtctggacattccttcaattaagactgtcattaactatgatgtggcacgagacattgatacccacacgcataggattggccgcacaggaagagcgggtgagaaaggtgtggcctataccctactcactcccaaggacagcaattttgctggtgacctggtccggaacttggaaggagccaatcaacacgtttctaaggaactcctagatctggcaatgcagaatgcctggtttcggaaatctcgattcaaaggagggaaaggaaaaaagctgaacattggtggaggaggcctaggctacagggagcggcctggcctgggctctgagaacatggatcgaggaaataacaatgtaatgagcaattatgaggcctacaagccttccacaggagctatgggagatcgactaacggcaatgaaagcagctttccagtcacagtacaagagtcactttgttgcagccagtttaagtaatcagaaggctggaagttctgctgctggggcaagtgggtggactagtgcagggagcttgaattctgttccaactaactcagcacaacagggccataacagtcctgacagccccgtcaccagtgccgccaagggcatcccaggctttggcaatactggcaacatcagtggtgcccctgtgacctacccgtctgccggagcccaaggagtcaacaacacagcttcagggaataacagccgagaagggactgggggcagcaacgggaaaagagagagatatactgagaaccggggcagcagcccgtcacagtcacggagagactggcaatcggcatagcgatagtccacgtcacggagatggtggtcgccatggagatggataccgccatccagaaagcagcagccgtcatactgatggccatcggcacggggagaacagacatggaggaagcgcaggccggcatggggagaaccggggtgcaaatgatggtcggaatggggaaagcaggaaagaagcttttaatcgtgagagcaagatggagcccaagatggaacccaaagtggacagcagcaagatggacaaggtggacagcaagacagataagacagctgacggctttgctgtcccagagccgcctaaacgcaagaaaagtcgatgggacagttagaggggatgtgctaaagcgtgaaatcagttgtccttaatttttagaaagattttggtaactaggtgtctcagggctgggttggggtccaaagtgtaaggaccccctgcccttagtggagagctggagcttggagacattaccccttcatcagaaggaattttcggatgttttcttgggaagctgttttggtccttggaagcagtgagagctgggaagcttcttttggctctaggtgagttgtcatgtgggtaagttgaggttatcttgggataaagggtcttctagggcacaaaactcactctaggtttatattgtatgtagcttatattttttactaaggtgtcaccttataagcatctataaattgacttctttttcttagttgtatggccaggcagtccccattttaggagttggcttctgcaaattcaatccattgagctaactgttggggagcaatttggtagttgtagacatttgcagggaagggagatgtctgattctaaatgggagttgatgctcaggtccccagccaggtttgcatccagccctgagacatgtaggaaacacctttcagacccaggctctgaagattcccagaagccacaaggattgaagggaaaaggtgatcctggtaactgttccaggattgctccaggtttgagatggtattgctaaatttaaaattaaacaagaaacccaacaacagcttttaaagtgtcttctatctcattgtattttttttaacttgccccaatgatagaaaagtcttttgctgaaatgattttgatgatttttgtttatcgtttataaaaaggaaaagaaatatacaaactttgacttttgtgaaaaaaaaaaaaaaaaaaaaa

SEQ ID NO: 525 - protein, 442 aa, Homo sapiens
MDFSVKVDIEKEVTCPICLELLTEPLSLDCGHSFCQACITAKIKESVIISRGESSCPVCQTRFQPGNLRPNRHLANIVERVKEVKMSPQEGQKRDVCEHHGKKLQIFCKEDGKVICWVCELSQEHQGHQTFRINEVVKECQEKLQVALQRLIKEDQEAEKLEDDIRQERTAWKIERQKILKGFNEMRVILDNEEQRELQKLEEGEVNVLDNLAAATDQLVQQRQDASTLISDLQRRLTGSSVEMLQDVIDVMKRSESWTLKKPKSVSKKLKSVFRVPDLSGMLQVLKELTDVQYYWVDVMLNPGSATSNVAISVDQRQVKTVRTCTFKNSNPCDFSAFGVFGCQYFSSGKYYWEVDVSGKIAWILGVHSKISSLNKRKSSGFAFDPSVNYSKVYSRYRPQYGYWVIGLQNTCEYNAFEDSSSSDPKVLTLFMAVLPVVLGFS

SEQ ID NO: 526 - DNA, 2815 bp, Homo sapiens
gaattcggcacgagctcttctcccctgattcaagactcctctgctttggactgaagcactgcaggagtttgtgaccaagaacttcaagagtcaagacagaaggaagccaagggagcagtgcaatggatttctcagtaaaggtagacatagagaaggaggtgacctgccccatctgcctggagctcctgacagaacctctgagcctagattgtggccacagcttctgccaagcctgcatcactgcaaagatcaaggagtcagtgatcatctcaagaggggaaagcagctgtcctgtgtgtcagaccagattccagcctgggaacctccgacctaatcggcatctggccaacatagttgagagagtcaaagaggtcaagatgagcccacaggaggggcagaagagagatgtctgtgagcaccatggaaaaaaactccagatcttctgtaaggaggatggaaaagtcatttgctgggtttgtgaactgtctcaggaacaccaaggtcaccaaacattccgcataaacgaggtggtcaaggaatgtcaggaaaagctgcaggtagccctgcagaggctgataaaggaggatcaagaggctgagaagctggaagatgacatcagacaagagagaaccgcctggaagatcgagagacagaagattctgaaagggttcaatgaaatgagagtcatcttggacaatgaggagcagagagagctgcaaaagctggaggaaggtgaggtgaatgtgctggacaacctggcagcagctacagaccagctggtccagcagaggcaggatgccagcacgctcatctcagatctccagcggaggttgacgggatcgtcagtagagatgctgcaggatgtgattgacgtcatgaaaaggagtgaaagctggacattgaagaagccaaaatctgtttccaagaaactaaagagtgtattccgagtaccagatctgagtgggatgctgcaagttcttaaagagctgacagatgtccagtactactgggtggacgtgatgctgaatccaggcagtgccacttcgaatgttgctatttctgtggatcagagacaagtgaaaactgtacgcacctgcacatttaagaattcaaatccatgtgatttttctgcttttggtgtcttcggctgccaatatttctcttcggggaaatattactgggaagtagatgtgtctggaaagattgcctggatcctgggcgtacacagtaaaataagtagtctgaataaaaggaagagctctgggtttgcttttgatccaagtgtaaattattcaaaagtttactccagatatagacctcaatatggctactgggttataggattacagaatacatgtgaatataatgcttttgaggactcctcctcttctgatcccaaggttttgactctctttatggctgtgctccctgtcgtattggggttttcctagactatgaggcaggcattgtctcatttttcaatgtcacaaaccacggagcactcatctacaagttctctggatgtcgcttttctcgacctgcttatccgtatttcaatccttggaactgcctagtccccatgactgtgtgcccaccgagctcctgagtgttctcattcctttacccacttctgcatagtagcccttgtgctgagactcagattctgcacctgagttcatctctactgagaccatctcttcctttctttccccttcttttacttagaatgtctttgtattcatttgctagggcttccatagcaaagcatcatagattgctgatttaaactgtaattgtattgccgtactgtgggctggaaatcccaaatctagattccagcagagttggttctttctgaggtctgcaaggaagggctctgttccatgcctctctccttggcttgtagaaggcatcttgtccctatgactcttcacattgtctttatgtacatctctgtgcccaagttttccctttttattaagacaccagtcatactggctcagggcccaccgctaatgccttaatgaaatcattttaacattatattctctacaaagaccttatttccaaataagataatatttggaggtattgggaataaaatttgaggaaggcacgatttcactcataacaatcttaccctttcttgcaagagatgcttgtacattattttcctaataccttggtttcactagtagtaaacattattattttttttatatttgcaaaggaaacatatctaatccttcctatagaaagaacagtattgctgtaattccttttcttttcttcctcatttcctctgccccttaaaagattgaagaaagagaaacttgtcaactcatatccacgttatctagcaaaagtcataagaatctatcactaagtaatgtatccttcagaatgtgttggtttaccagtgacaccccatattcatcacaaaattaaagcaagaagtccatagtaatttatttgctaatagtggatttttaatgctcagagtttctgaggtcaaattttatcttttcacttacaagctctatgatcttaaataatttacttaatgtattttggtgtattttcctcaaattaatattggtgttcaagactatatctaattcctctgatcactttgagaaacaaacttttattaaatgtaaggcacttttctatgaattttaaatataaaaataaatattgttctgattattactgaaaagatgtcagccatttcaatgtcttgggaaacaattttttgtttttgttctgttttctttttgcttcaataaaacaatagctggctctaaaaaaaaaa

SEQ ID NO: 527 - protein, 604 aa, Homo sapiens
MLARALLLCAVLALSHTANPCCSHPCQNRGVCMSVGFDQYKCDCTRTGFYGENCSTPEFLTRIKLFLKPTPNTVHYILTHFKGFWNVVNNIPFLRNAIMSYVLTSRSHLIDSPPTYNADYGYKSWEAFSNLSYYTRALPPVPDDCPTPLGVKGKKQLPDSNEIVEKLLLRRKFIPDPQGSNMMFAFFAQHFTHQFFKTDHKRGPAFTNGLGHGVDLNHIYGETLARQRKLRLFKDGKMKYQIIDGEMYPPTVKDTQAEMIYPPQVPEHLRFAVGQEVFGLVPGLMMYATIWLREHNRVCDVLKQEHPEWGDEQLFQTSRLILIGETIKIVIEDYVQHLSGYHFKLKFDPELLFNKQFQYQNRIAAEFNTLYHWHPLLPDTFQIHDQKYNYQQFIYNNSILLEHGITQFVESFTRQIAGRVAGGRNVPPAVQKVSQASIDQSRQMKYQSFNEYRKRFMLKPYESFEELTGEKEMSAELEALYGDIDAVELYPALLVEKPRPDAIFGETMVEVGAPFSLKGLMGNVICSPAYWKPSTFGGEVGFQIINTASIQSLICNNVKGCPFTSFSVPDPELIKTVTINASSSRSGLDDINPTVLLKERSTEL

SEQ ID NO: 528 - DNA, 4465 bp, Homo sapiens
caattgtcatacgacttgcagtgagcgtcaggagcacgtccaggaactcctcagcagcgcctccttcagctccacagccagacgccctcagacagcaaagcctacccccgcgccgcgccctgcccgccgctcggatgctcgcccgcgccctgctgctgtgcgcggtcctggcgctcagccatacagcaaatccttgctgttcccacccatgtcaaaaccgaggtgtatgtatgagtgtgggatttgaccagtataagtgcgattgtacccggacaggattctatggagaaaactgctcaacaccggaatttttgacaagaataaaattatttctgaaacccactccaaacacagtgcactacatacttacccacttcaagggattttggaacgttgtgaataacattcccttccttcgaaatgcaattatgagttatgtcttgacatccagatcacatttgattgacagtccaccaacttacaatgctgactatggctacaaaagctgggaagccttctctaacctctcctattatactagagcccttcctcctgtgcctgatgattgcccgactcccttgggtgtcaaaggtaaaaagcagcttcctgattcaaatgagattgtggaaaaattgcttctaagaagaaagttcatccctgatccccagggctcaaacatgatgtttgcattctttgcccagcacttcacgcatcagtttttcaagacagatcataagcgagggccagctttcaccaacgggctgggccatggggtggacttaaatcatatttacggtgaaactctggctagacagcgtaaactgcgccttttcaaggatggaaaaatgaaatatcagataattgatggagagatgtatcctcccacagtcaaagatactcaggcagagatgatctaccctcctcaagtccctgagcatctacggtttgctgtggggcaggaggtctttggtctggtgcctggtctgatgatgtatgccacaatctggctgcgggaacacaacagagtatgcgatgtgcttaaacaggagcatcctgaatggggtgatgagcagttgttccagacaagcaggctaatactgataggagagactattaagattgtgattgaagattatgtgcaacacttgagtggctatcacttcaaactgaaatttgacccagaactacttttcaacaaacaattccagtaccaaaatcgtattgctgctgaatttaacaccctctatcactggcatccccttctgcctgacacctttcaaattcatgaccagaaatacaactatcaacagtttatctacaacaactctatattgctggaacatggaattacccagtttgttgaatcattcaccaggcaaattgctggcagggttgctggtggtaggaatgttccacccgcagtacagaaagtatcacaggcttccattgaccagagcaggcagatgaaataccagtcttttaatgagtaccgcaaacgctttatgctgaagccctatgaatcatttgaagaacttacaggagaaaaggaaatgtctgcagagttggaagcactctatggtgacatcgatgctgtggagctgtatcctgcccttctggtagaaaagcctcggccagatgccatctttggtgaaaccatggtagaagttggagcaccattctccttgaaaggacttatgggtaatgttatatgttctcctgcctactggaagccaagcacttttggtggagaagtgggttttcaaatcatcaacactgcctcaattcagtctctcatctgcaataacgtgaagggctgtccctttacttcattcagtgttccagatccagagctcattaaaacagtcaccatcaatgcaagttcttcccgctccggactagatgatatcaatcccacagtactactaaaagaacgttcgactgaactgtagaagtctaatgatcatatttatttatttatatgaaccatgtctattaatttaattatttaataatatttatattaaactccttatgttacttaacatcttctgtaacagaagtcagtactcctgttgcggagaaaggagtcatacttgtgaagacttttatgtcactactctaaagattttgctgttgctgttaagtttggaaaacagtttttattctgttttataaaccagagagaaatgagttttgacgtctttttacttgaatttcaacttatattataagaacgaaagtaaagatgtttgaatacttaaacactatcacaagatggcaaaatgctgaaagtttttacactgtcgatgtttccaatgcatcttccatgatgcattagaagtaactaatgtttgaaattttaaagtacttttggttatttttctgtcatcaaacaaaaacaggtatcagtgcattattaaatgaatatttaaattagacattaccagtaatttcatgtctactttttaaaatcagcaatgaaacaataatttgaaatttctaaattcatagggtagaatcacctgtaaaagcttgtttgatttcttaaagttattaaacttgtacatataccaaaaagaagctgtcttggatttaaatctgtaaaatcagatgaaattttactacaattgcttgttaaaatattttataagtgatgttcctttttcaccaagagtataaacctttttagtgtgactgttaaaacttccttttaaatcaaaatgccaaatttattaaggtggtggagccactgcagtgttatctcaaaataagaatattttgttgagatattccagaatttgtttatatggctggtaacatgtaaaatctatatcagcaaaagggtctacctttaaaataagcaataacaaagaagaaaaccaaattattgttcaaatttaggtttaaacttttgaagcaaacttttttttatccttgtgcactgcaggcctggtactcagattttgctatgaggttaatgaagtaccaagctgtgcttgaataacgatatgttttctcagattttctgttgtacagtttaatttagcagtccatatcacattgcaaaagtagcaatgacctcataaaatacctcttcaaaatgcttaaattcatttcacacattaattttatctcagtcttgaagccaattcagtaggtgcattggaatcaagcctggctacctgcatgctgttccttttcttttcttcttttagccattttgctaagagacacagtcttctcatcacttcgtttctcctattttgttttactagttttaagatcagagttcactttctttggactctgcctatattttcttacctgaacttttgcaagttttcaggtaaacctcagctcaggactgctatttagctcctcttaagaagattaaaagagaaaaaaaaaggcccttttaaaaatagtatacacttattttaagtgaaaagcagagaattttatttatagctaattttagctatctgtaaccaagatggatgcaaagaggctagtgcctcagagagaactgtacggggtttgtgactggaaaaagttacgttcccattctaattaatgccctttcttatttaaaaacaaaaccaaatgatatctaagtagttctcagcaataataataatgacgataatacttcttttccacatctcattgtcactgacatttaatggtactgtatattacttaatttattgaagattattatttatgtcttattaggacactatggttataaactgtgtttaagcctacaatcattgatttttttttgttatgtcacaatcagtatattttctttggggttacctctctgaatattatgtaaacaatccaaagaaatgattgtattaagatttgtgaataaatttttagaaatctgattggcatattgagatatttaaggttgaatgtttgtccttaggataggcctatgtgctagcccacaaagaatattgtctcattagcctgaatgtgccataagactgaccttttaaaatgttttgagggatctgtggatgcttcgttaatttgttcagccacaatttattgagaaaatattctgtgtcaagcactgtgggttttaatatttttaaatcaaacgctgattacagataatagtatttatataaataattgaaaaaaattttcttttgggaagagggagaaaatgaaataaatatcattaaagataactcaggagaatcttctttacaattttacgtttagaatgtttaaggttaagaaagaaatagtcaatatgcttgtataaaacactgttcactgttttttttaaaaaaaaaacttgatttgttattaacattgatctgctgacaaaacctgggaatttgggttgtgtatgcgaatgtttcagtgcctcagacaaatgtgtatttaacttatgtaaaagataagtctggaaataaatgtctgtttatttttgtactattta

SEQ ID NO: 529 - protein, 107 aa, Homo sapiens
MARAALSAAPSNPRLLRVALLLLLLVAAGRRAAGASVATELRCQCLQTLQGIHPKNIQSVNVKSPGPHCAQTEVIATLKNGRKACLNPASPIVKKIIEKMLNSDKSN

SEQ ID NO: 530 - DNA, 1103 bp, Homo sapiens
cacagagcccgggccgcaggcacctcctcgccagctcttccgctcctctcacagccgccagacccgcctgctgagccccatggcccgcgctgctctctccgccgcccccagcaatccccggctcctgcgagtggcactgctgctcctgctcctggtagccgctggccggcgcgcagcaggagcgtccgtggccactgaactgcgctgccagtgcttgcagaccctgcagggaattcaccccaagaacatccaaagtgtgaacgtgaagtcccccggaccccactgcgcccaaaccgaagtcatagccacactcaagaatgggcggaaagcttgcctcaatcctgcatcccccatagttaagaaaatcatcgaaaagatgctgaacagtgacaaatccaactgaccagaagggaggaggaagctcactggtggctgttcctgaaggaggccctgcccttataggaacagaagaggaaagagagacacagctgcagaggccacctggattgtgcctaatgtgtttgagcatcgcttaggagaagtcttctatttatttatttattcattagttttgaagattctatgttaatattttaggtgtaaaataattaagggtatgattaactctacctgcacactgtcctattatattcattctttttgaaatgtcaaccccaagttagttcaatctggattcatatttaatttgaaggtagaatgttttcaaatgttctccagtcattatgttaatatttctgaggagcctgcaacatgccagccactgtgatagaggctggcggatccaagcaaatggccaatgagatcattgtgaaggcaggggaatgtatgtgcacatctgttttgtaactgtttagatgaatgtcagttgttatttattgaaatgatttcacagtgtgtggtcaacatttctcatgttgaaactttaagaactaaaatgttctaaatatcccttggacattttatgtctttcttgtaaggcatactgccttgtttaatggtagttttacagtgtttctggcttagaacaaaggggcttaattattgatgttttcatagagaatataaaaataaagcacttatag

SEQ ID NO: 531 - protein, 78 aa, Homo sapiens
MDCCTENACSKPDDDILDIPLDDPGANAAAAKIQASFRGHMARKKIKSGERGRKGPGPGGPGGAGVARGGAGGGPSGD

SEQ ID NO: 532 - DNA, 1295 bp, Homo sapiens
ctccacttctccccgcccaccctgccggaggctgctcctgattggcttcccggccgcggggctcaggttacattcgcgagcggagccgagcgcgggagaccggacccgagagcagagctgctgtttcggcgcgggtcggctggcggccgatgccccagagcccccacccggcaccacacagaccccatccccgccctgcgccaccttcgtccccgcagaggacccccgacaccagcatggactgctgcaccgagaacgcctgctccaagccggacgacgacattctagacatcccgctggacgatcccggcgccaacgcggccgccgccaaaatccaggcgagttttcggggccacatggcgcggaagaagataaagagcggagagcgcggccggaagggcccgggccctggggggcctggcggagctggggtggcccggggaggcgcgggcggcggccccagcggagactaggccagaactgagcattttcaaagttcccgaggagagatggatgccgcgtccccttcgcagcgacgagacttccctgccgtgtttgtgaccccctcctgcccagcaacctgccagctacaggagccccctgcgtcccagagactccctcacccaggcaggctccgtcgcggagtcgctgagtccgtgcccttttagttagttctgcagtctagtatggtccccatttgcccttccactccaccccaccctaaaccatgcgctcccaatcttccttcttttgcttctcgcccacctcttcccgcacccagcatgcagctctgcctccgcagcctcagtgcgctttcctgcgcgcactgcggagggcgccctaagcgtcacccaagcacactcacttaaagaaaaaacgagttctttcgttctgtgcgcagtaaaaggggcgccctacatctccgtgccactcccgccccagcctagccccaagactttggatccggggcgagatgaagggaagagggttgttttggtttcggacgacccttgctctgaccggaagagaagtccctatcccacacctgcctgtcacgttccctcccctttccccagcgcactgttgagggcagcctctccagctctcttgtttatgcaaacgccgagcgcctgggaggctcggtaggaggagtcttccacggccccgccccgccctgtcggtcccgccctccccccccgccgggctcctggggctgtggccgaaaggtttctgatctccgtgtgtgcatgtgactgtgctgggttggaatgtgaacaataaagaggaatgtccaa

SEQ ID NO: 533 - protein, 266 aa, Homo sapiens
MMALGAAGATRVFVAMVAAALGGHPLLGVSATLNSVLNSNAIKNLPPPLGGAAGHPGSAVSAAPGILYPGGNKYQTIDNYQPYPCAEDEECGTDEYCASPTRGGDAGVQICLACRKRRKRCMRHAMCCPGNYCKNGICVSSDQNHFRGEIEETITESFGNDHSTLDGYSRRTTLSSKMYHTKGQEGSVCLRSSDCASGLCCARHFWSKICKPVLKEGQVCTKHRRKGSHGLEIFQRCYCGEGLSCRIQKDHHQASNSSRLHTCQRH

SEQ ID NO: 534 - DNA, 856 bp, Homo sapiens
cagctgttagcagtaatgcattacaaccctgaagttaatcactatttcctgcttccttaggaatatgtgtgtcttctgatcaaaatcatttccgaggagaaattgaggaaaccatcactgaaagctttggtaatgatcatagcaccttggatgggtattccagaagaaccaccttgtcttcaaaaatgtatcacaccaaaggtaaggatgttaagactcattcttagcacatcagaagtgtcttttgaattattttagtgaaacgatgcaggtttaacagtaactatgtacttttttcctactgtcttctccttcgtaggacaagaaggttctgtttgtctccggtcatcagactgtgcctcaggattgtgttgtgctagacacttctggtccaagatctgtaaacctgtcctgaaagaaggtcaagtgtgtaccaagcataggagaaaaggctctcatggactagaaatattccagcgttgttactgtggagaaggtctgtcttgccggatacagaaagatcaccatcaagccagtaattcttctaggcttcacacttgtcagagacactaaaccagctatccaaatgcagtgaactccttttatataatagatgctatgaaaaccttttatgaccttcatcaactcaatcctaaggatatacaagttctgtggtttcagttaagcattccaataacaccttccaaaaacctggagtgtaagagctttgtttctttatggaactcccctgtgattgcagtaaattactgtattgtaaattctcagtgtggcacttacctgtaaatgcaatgaaacttttaattatttttctaaaggtgctgcactgcctattttt

SEQ ID NO: 535 - protein, 323 aa, Homo sapiens
MARGPGLAPPPLRLPLLLLVLAAVTGHTAAQDNCTCPTNKMTVCSPDGPGGRCQCRALGSGMAVDCSTLTSKCLLLKARMSAPKNARTLVRPSEHALVDNDGLYDPDCDPEGRFKARQCNQTSVCWCVNSVGVRRTDKGDLSLRCDELVRTHHILIDLRHRPTAGAFNHSDLDAELRRLFRERYRLHPKFVAAVHYEQPTIQIELRQNTSQKAAGEVDIGDAAYYFERDIKGESLFQGRGGLDLRVRGEPLQVERTLIYYLDEIPPKFSMKRLTAGLIAVIVVVVVALVAGMAVLVITNRRKSGKYKKVEIKELGELRKEPSL

SEQ ID NO: 536 - DNA, 2805 bp, Homo sapiens
cgggtctgatagtccctacctgtcaggactggtgttaggatgagataatgtttgtgaactgtaaacatatataaacgtgtgctactgtgagaactggaacaaagaagagagggagtgagagaaatcaagggagggctggggctgggaaagaacgaaaagggagtcgcgtatagaggagaggcgacagtcgcgagccacactttgcaatgaaactctttagactttctgccgggagagcggcccagacgcgccaggtctgtagcaggaggccgcgagggcgggtccccagaagcctacaggtgagtatcggttctccccttcccggctttcggtccggaggaggcgggagcagcttccctgttctgatcctatcgcgggcggcgcagggccggcttggccttccgtgggacggggaggggggcgggatgtgtcacccaaataccagtggggacggtcggtggtggaaccagccgggcaggtcgggtagagtataagagccggagggagcggccggggcgcagacgcctgcagaccatcccagacgccggagcccgagccccgacgagtccccgcgcctcatccgcccgcgtccggtccgcgttcctccgccccaccatggctcggggccccggcctcgcgccgccaccgctgcggctgccgctgctgctgctggtgctggcggcggtgaccggccacacggccgcgcaggacaactgcacgtgtcccaccaacaagatgaccgtgtgcagccccgacggccccggcggccgctgccagtgccgcgcgctgggctcgggcatggcggtcgactgctccacgctgacctccaagtgtctgctgctcaaggcgcgcatgagcgcccccaagaacgcccgcacgctggtgcggccgagtgagcacgcgctcgtggacaacgatggcctctacgaccccgactgcgaccccgagggccgcttcaaggcgcgccagtgcaaccagacgtcggtgtgctggtgcgtgaactcggtgggcgtgcgccgcacggacaagggcgacctgagcctacgctgcgatgagctggtgcgcacccaccacatcctcattgacctgcgccaccgccccaccgccggcgccttcaaccactcagacctggacgccgagctgaggcggctcttccgcgagcgctatcggctgcaccccaagttcgtggcggccgtgcactacgagcagcccaccatccagatcgagctgcggcagaacacgtctcagaaggccgccggtgaagtggatatcggcgatgccgcctactacttcgagagggacatcaagggcgagtctctattccagggccgcggcggcctggacttgcgcgtgcgcggagaacccctgcaggtggagcgcacgctcatctattacctggacgagattcccccgaagttctccatgaagcgcctcaccgccggcctcatcgccgtcatcgtggtggtcgtggtggccctcgtcgccggcatggccgtcctggtgatcaccaaccggagaaagtcggggaagtacaagaaggtggagatcaaggaactgggggagttgagaaaggaaccgagcttgtaggtacccggcggggcaggggatggggtggggtaccggatttcggtatcgtcccagacccaagtgagtcacgcttcctgattcctcggcgcaaaggagacgtttatcctttcaaattcctgccttccccctcccttttgcgcacacaccaggtttaatagatcctggcctcagggtctcctttctttctcacttctgtcttgagggaagcatttctaaaatgtatcccctttcggtccaacaacaggaaacctgactggggcagtgaaggaagggatggcacagcgttatgtgtaaaaaacaagtatctgtatgacaacccgggatcgtttgcaagtaactgaatccattgcgacattgtgaaggcttaaatgagtttagatgggaaatagcgttgttatcgccttgggtttaaattatttgatgagttccacttgtatcatggcctacccgaggagaagaggagtttgttaactgggcctatgtagtagcctcatttaccatcgtttgtattactgaccacatatgcttgtcactgggaaagaagcctgtttcagctgcctgaacgcagtttggatgtctttgaggacagacattgcccggaaactcagtctatttattcttcagcttgcccttactgccactgatattggtaatgttcttttttgtaaaatgtttgtacatatgttgtctttgataatgttgctgtaattttttaaaataaaacacgaatttaataaaatatgggaaaggcacaaaccagaagtcggcatttgtgaaaagtccctccagatttctatcactttggtctctaatttcccaagacttgtattttttttttatttcaaattataacacttttttttcccccagaagtgggtgtttcatgttgctactctggtgtgtcccaagatatcctaactggccagtgtaaatgctattctttctaaataagattatttggaaacttccttcaaactgcaggagggcgagctctgagggcacgagaagctaaaactagctgcttttgatgaaaaagagtgccagtctttggtcatctctaaacaaggcttatcaccaatggagacagaaaactctagttcaagagctgtacctcctttgaatcccagccctactcgaaataagtggtactatttccatttagcctttgagcaaatcacttaactcaaaggcgttgtggctctaagattaaacgacttt

SEQ ID NO: 537 - protein, 1193 aa, Homo sapiens
MPALWLGCCLCFSLLLPAARATSRREVCDCNGKSRQCIFDRELHRQTGNGFRCLNCNDNTDGIHCEKCKNGFYRHRERDRCLPCNCNSKGSLSARCDNSGRCSCKPGVTGARCDRCLPGFHMLTDAGCTQDQRLLDSKCDCDPAGIAGPCDAGRCVCKPAVTGERCDRCRSGYYNLDGGNPEGCTQCFCYGHSASCRSSAEYSVHKITSTFHQDVDGWKAVQRNGSPAKLQWSQRHQDVFSSAQRLDPVYFVAPAKFLGNQQVSYGQSLSFDYRVDRGGRHPSAHDVILEGAGLRITAPLMPLGKTLPCGLTKTYTFRLNEHPSNNWSPQLSYFEYRRLLRNLTALRIRATYGEYSTGYIDNVTLISARPVSGAPAPWVEQCICPVGYKGQFCQDCASGYKRDSARLGPFGTCIPCNCQGGGACDPDTGDCYSGDENPDIECADCPIGFYNDPHDPRSCKPCPCHNGFSCSVMPETEEVVCNNCPPGVTGARCELCADGYFGDPFGEHGPVRPCQPCQCNNNVDPSASGNCDRLTGRCLKCIHNTAGIYCDQCKAGYFGDPLAPNPADKCRACNCNPMGSEPVGCRSDGTCVCKPGFGGPNCEHGAFSCPACYNQVKIQMDQFMQQLQRMEALISKAQGGDGVVPDTELEGRMQQAEQALQDILRDAQISEGASRSLGLQLAKVRSQENSYQSRLDDLKMTVERVRALGSQYQNRVRDTHRLITQMQLSLAESEASLGNTNIPASDHYVGPNGFKSLAQEATRLAESHVESASNMEQLTRETEDYSKQALSLVRKALHEGVGSGSGSPDGAVVQGLVEKLEKTKSLAQQLTREATQAEIEADRSYQHSLRLLDSVSRLQGVSDQSFQVEEAKRIKQKADSLSTLVTRHMDEFKRTQKNLGNWKEEAQQLLQNGKSGREKSDQLLSRANLAKSRAQEALSMGNATFYEVESILKNLREFDLQVDNRKAEAEEAMKRLSYISQKVSDASDKTQQAERALGSAAADAQRAKNGAGEALEISSEIEQEIGSLNLEANVTADGALAMEKGLASLKSEMREVEGELERKELEFDTNMDAVQMVITEAQKVDTRAKNAGVTIQDTLNTLDGLLHLMDQPLSVDEEGLVLLEQKLSRAKTQINSQLRPMMSELEERARQQRGHLHLLETSIDGILADVKNLENIRDNLPPGCYNTQALEQQ

SEQ ID NO: 538 - DNA, 5175 bp, Homo sapiens
acagcggagcgcagagtgagaaccaccaaccgaggcgccgggcagcgacccctgcagcggagacagagactgagcggcccggcaccgccatgcctgcgctctggctgggctgctgcctctgcttctcgctcctcctgcccgcagcccgggccacctccaggagggaagtctgtgattgcaatgggaagtccaggcagtgtatctttgatcgggaacttcacagacaaactggtaatggattccgctgcctcaactgcaatgacaacactgatggcattcactgcgagaagtgcaagaatggcttttaccggcacagagaaagggaccgctgtttgccctgcaattgtaactccaaaggttctcttagtgctcgatgtgacaactctggacggtgcagctgtaaaccaggtgtgacaggagccagatgcgaccgatgtctgccaggcttccacatgctcacggatgcggggtgcacccaagaccagagactgctagactccaagtgtgactgtgacccagctggcatcgcagggccctgtgacgcgggccgctgtgtctgcaagccagctgttactggagaacgctgtgataggtgtcgatcaggttactataatctggatggggggaaccctgagggctgtacccagtgtttctgctatgggcattcagccagctgccgcagctctgcagaatacagtgtccataagatcacctctacctttcatcaagatgttgatggctggaaggctgtccaacgaaatgggtctcctgcaaagctccaatggtcacagcgccatcaagatgtgtttagctcagcccaacgactagaccctgtctattttgtggctcctgccaaatttcttgggaatcaacaggtgagctatgggcaaagcctgtcctttgactaccgtgtggacagaggaggcagacacccatctgcccatgatgtgattctggaaggtgctggtctacggatcacagctcccttgatgccacttggcaagacactgccttgtgggctcaccaagacttacacattcaggttaaatgagcatccaagcaataattggagcccccagctgagttactttgagtatcgaaggttactgcggaatctcacagccctccgcatccgagctacatatggagaatacagtactgggtacattgacaatgtgaccctgatttcagcccgccctgtctctggagccccagcaccctgggttgaacagtgtatatgtcctgttgggtacaaggggcaattctgccaggattgtgcttctggctacaagagagattcagcgagactggggccttttggcacctgtattccttgtaactgtcaagggggaggggcctgtgatccagacacaggagattgttattcaggggatgagaatcctgacattgagtgtgctgactgcccaattggtttctacaacgatccgcacgacccccgcagctgcaagccatgtccctgtcataacgggttcagctgctcagtgatgccggagacggaggaggtggtgtgcaataactgccctcccggggtcaccggtgcccgctgtgagctctgtgctgatggctactttggggacccctttggtgaacatggcccagtgaggccttgtcagccctgtcaatgcaacaacaatgtggaccccagtgcctctgggaattgtgaccggctgacaggcaggtgtttgaagtgtatccacaacacagccggcatctactgcgaccagtgcaaagcaggctacttcggggacccattggctcccaacccagcagacaagtgtcgagcttgcaactgtaaccccatgggctcagagcctgtaggatgtcgaagtgatggcacctgtgtttgcaagccaggatttggtggccccaactgtgagcatggagcattcagctgtccagcttgctataatcaagtgaagattcagatggatcagtttatgcagcagcttcagagaatggaggccctgatttcaaaggctcagggtggtgatggagtagtacctgatacagagctggaaggcaggatgcagcaggctgagcaggcccttcaggacattctgagagatgcccagatttcagaaggtgctagcagatcccttggtctccagttggccaaggtgaggagccaagagaacagctaccagagccgcctggatgacctcaagatgactgtggaaagagttcgggctctgggaagtcagtaccagaaccgagttcgggatactcacaggctcatcactcagatgcagctgagcctggcagaaagtgaagcttccttgggaaacactaacattcctgcctcagaccactacgtggggccaaatggctttaaaagtctggctcaggaggccacaagattagcagaaagccacgttgagtcagccagtaacatggagcaactgacaagggaaactgaggactattccaaacaagccctctcactggtgcgcaaggccctgcatgaaggagtcggaagcggaagcggtagcccggacggtgctgtggtgcaagggcttgtggaaaaattggagaaaaccaagtccctggcccagcagttgacaagggaggccactcaagcggaaattgaagcagataggtcttatcagcacagtctccgcctcctggattcagtgtctcggcttcagggagtcagtgatcagtcctttcaggtggaagaagcaaagaggatcaaacaaaaagcggattcactctcaacgctggtaaccaggcatatggatgagttcaagcgtacacaaaagaatctgggaaactggaaagaagaagcacagcagctcttacagaatggaaaaagtgggagagagaaatcagatcagctgctttcccgtgccaatcttgctaaaagcagagcacaagaagcactgagtatgggcaatgccactttttatgaagttgagagcatccttaaaaacctcagagagtttgacctgcaggtggacaacagaaaagcagaagctgaagaagccatgaagagactctcctacatcagccagaaggtttcagatgccagtgacaagacccagcaagcagaaagagccctggggagcgctgctgctgatgcacagagggcaaagaatggggccggggaggccctggaaatctccagtgagattgaacaggagattgggagtctgaacttggaagccaatgtgacagcagatggagccttggccatggaaaagggactggcctctctgaagagtgagatgagggaagtggaaggagagctggaaaggaaggagctggagtttgacacgaatatggatgcagtacagatggtgattacagaagcccagaaggttgataccagagccaagaacgctggggttacaatccaagacacactcaacacattagacggcctcctgcatctgatggaccagcctctcagtgtagatgaagaggggctggtcttactggagcagaagctttcccgagccaagacccagatcaacagccaactgcggcccatgatgtcagagctggaagagagggcacgtcagcagaggggccacctccatttgctggagacaagcatagatgggattctggctgatgtgaagaacttggagaacattagggacaacctgcccccaggctgctacaatacccaggctcttgagcaacagtgaagctgccataaatatttctcaactgaggttcttgggatacagatctcagggctcgggagccatgtcatgtgagtgggtgggatggggacatttgaacatgtttaatgggtatgctcaggtcaactgacctgaccccattcctgatcccatggccaggtggttgtcttattgcaccatactccttgcttcctgatgctgggcaatgaggcagatagcactgggtgtgagaatgatcaaggatctggaccccaaagaatagactggatggaaagacaaactgcacaggcagatgtttgcctcataatagtcgtaagtggagtcctggaatttggacaagtgctgttgggatatagtcaacttattctttgagtaatgtgactaaaggaaaaaactttgactttgcccaggcatgaaattcttcctaatgtcagaacagagtgcaacccagtcacactgtggccagtaaaatactattgcctcatattgtcctctgcaagcttcttgctgatcagagttcctcctacttacaacccagggtgtgaacatgttctccattttcaagctggaagaagtgagcagtgttggagtgaggacctgtaaggcaggcccattcagagctatggtgcttgctggtgcctgccaccttcaagttctggacctgggcatgacatcctttcttttaatgatgccatggcaacttagagattgcatttttattaaagcatttcctaccagcaaagcaaatgttgggaaagtatttactttttcggtttcaaagtgatagaaaagtgtggcttgggcattgaaagaggtaaaattctctagatttattagtcctaattcaatcctacttttcgaacaccaaaaatgatgcgcatcaatgtattttatcttattttctcaatctcctctctctttcctccacccataataagagaatgttcctactcacacttcagctgggtcacatccatccctccattcatccttccatccatctttccatccattacctccatccatccttccaacatatatttattgagtacctactgtgtgccaggggctggtgggacagtggtgacatagtctctgccctcatagagttgattgtctagtgaggaagacaagcatttttaaaaaataaatttaaacttacaaactttgtttgtcacaagtggtgtttattgcaataaccgcttggtttgcaacctctttgctcaacagaacatatgttgcaagaccctcccatgggggcacttgagttttggcaaggctgacagagctctgggttgtgcacatttctttgcattccagctgtcactctgtgcctttctacaactgattgcaacagactgttgagttatgataacaccagtgggaattgctggaggaaccagaggcacttccaccttggctgggaagactatggtgctgccttgcttctgtatttccttggattttcctgaaagtgtttttaaataaagaacaattgttagatgcc

SEQ ID NO: 539 - protein, 201 aa, Homo sapiens
MANKGPSYGMSREVQSKIEKKYDEELEERLVEWIIVQCGPDVGRPDRGPLGFQVWLKNGVILSKLVNSLYPDGSKPVKVPENPPSMVFKQMEQVAQFLKAAEDSGVIKTDMFQTVDLFEGKDMAAVQRTLMALGSLAVTKNDGHYRGDPNWFMKKAQEHKREFTESQLQEGKHVIGLQMGSNRGASQAGMTGYGRPRQIIS

SEQ ID NO: 540 - DNA, 1085 bp, Homo sapiens
atcctgtctgtccgaacccagacacaagtcttcactccttcctgcgagccctgaggaagccttctttccccagacatggccaacaagggtccttcctatggcatgagccgcgaagtgcagtccaaaatcgagaagaagtatgacgaggagctggaggagcggctggtggagtggatcatagtgcagtgtggccctgatgtgggccgcccagaccgtgggcccttgggcttccaggtgtggctgaagaatggcgtgattctgagcaagctggtgaacagcctgtaccctgatggctccaagccggtgaaggtgcccgagaacccaccctccatggtcttcaagcagatggagcaggtggctcagttcctgaaggcggctgaggactctggggtcatcaagactgacatgttccagactgttgacctctttgaaggcaaagacatggcagcagtgcagaggaccctgatggctttgggcagcttggcagtgaccaagaatgatgggcactaccgtggagatcccaactggtttatgaagaaagcgcaggagcataagagggaattcacagagagccagctgcaggagggaaagcatgtcattggccttcagatgggcagcaacagaggggcctcccaggccggcatgacaggctacggacgacctcggcagatcatcagttagagcggagagggctagccctgagcccggcgctcccccagctccttggctgcagccatcccgcttagcctgcctcacccacacccgtgtggtaccttcagccctggccaagctttgaggctctgtcactgagcaatggtaactgcacctgggcagctcctccctgtgcccccagcctcagcccaacttcttacccgaaagcatcactgccttggcccctccctcccggcggcccccatcacctctactgtctcctccctgggctaagcaggggagaagcgggctgggggtagcctggatgtgggcgaagtccactgtcctccttggcggcaaaagcccattgaagaagaaccagcccagcctgccccctatcttgtacctggaatatttttggggttggaactctc

SEQ ID NO: 541 - protein, 99 aa, Homo sapiens
MKVSAALLCLLLIAATFIPQGLAQPDAINAPVTCCYNFTNRKISVQRLASYRRITSSKCPKEAVIFKTIVAKEICADPKQKWVQDSMDHLDKQTQTPKT

SEQ ID NO: 542 - DNA, 478 bp, Homo sapiens
cttcaagaccattgtggccaaggagatctgtgctgaccccaagcagaagtgggttcaggattccatggaccacctggacaagcaaacccaaactccgaagacttgaacacccactccacaacccaagaatctgcagctaacttattttcccctagctttccccagacaccttgttttattttattataatgaatttgtttgttgatgtgaaacattatgccttaagtaatgttaattcttatttaagttattgatgttttaagtatctttcatggtactagtgttttttagatacagagacttggggaaattgcttttcctcttttgaaccacagttctacccctgggatgttttgagggtctttgcaagaatcattaatacaaagaattttttttaacattccaatgcattgctaaaatattattgtggaaatgaatattttgtaactattacaccaaataaatatatttttgtaca

SEQ ID NO: 543 - protein, 522 aa, Homo sapiens
MEFPDHSRHLLQCLSEQRHQGFLCDCTVLVGDAQFRAHRAVLASCSMYFHLFYKDQLDKRDIVHLNSDIVTAPAFALLLEFMYEGKLQFKDLPIEDVLAAASYLHMYDIVKVCKKKLKEKATTEADSTKKEEDASSCSDKVESLSDGSSHIAGDLPSDEDEGEDEKLNILPSKRDLAAEPGNMWMRLPSDSAGIPQAGGEAEPHATAAGKTVASPCSSTESLSQRSVTSVRDSADVDCVLDLSVKSSLSGVENLNSSYFSSQDVLRSNLVQVKVEKEASCDESDVGTNDYDMEHSTVKESVSTNNRVQYEPAHLAPLREDSVLRELDREDKASDDEMMTPESERVQVEGGMESSLLPYVSNILSPAGQIFMCPLCNKVFPSPHILQIHLSTHFREQDGIRSKPAADVNVPTCSLCGKTFSCMYTLKRHERTHSGEKPYTCTQCGKSFQYSHNLSRHAVVHTREKPHACKWCERRFTQSGDLYRHIRKFHCELVNSLSVKSEALSLPTVRDWTLEDSSQELWK

SEQ ID NO: 544 - DNA, 4246 bp, Homo sapiens
tttaaactgtgctttctaagcacagtcaggtagcaaaagtaataaaaaggatggttgaacaagttttcttgtatgttccaggatatgtttgggacttttctttgtttattatatgagttgttccctttgaaattaaagctattttgtaggttttgtgggacataatttgataagtagagttaattaaatttcttctggaagagatctaaattcttattcttagtgagagactgtagttaaaaggaaggcttttagaacttgggttcaaggaagatggagatgcgtcggaagctctttggcgggggtgaggaagttcagaaagtgtgcattttccttctggcatttaggtcttgtccgtgtgatttggtggtgcttgggtcataagcctgattaaaattcagggacatgtaccacggcggccaaagcggaattaatttttttatatggggactggagcgctgaaaagttgttcctgaccaggctctaatgagaaattcctctctccccaggttatgaagacagtatggagtttccagaccatagtagacatttgctacagtgtctgagcgagcagagacaccagggttttctttgtgactgcactgttctggtgggagatgcccagttccgagcgcaccgagctgtactggcttcatgcagcatgtatttccacctcttttacaaggaccagctggacaaaagagacattgttcatctgaacagcgacattgttacagcccccgctttcgctctcctgcttgaattcatgtatgaagggaaactccagttcaaagacttgcccattgaagacgtgctagcagctgccagttatctccacatgtatgacattgtcaaagtctgcaaaaagaagctgaaagagaaagccaccacggaggcagacagcaccaaaaaggaagaagatgcttcaagttgttcggacaaagtcgagagtctctccgatggcagcagccacatagcaggcgatttgcccagtgatgaagatgaaggagaagatgaaaaattgaacatcctgcccagcaaaagggacttggcggccgagcctgggaacatgtggatgcgattgccctcagactcagcaggcatcccccaggctggcggagaggcagagccacacgccacagcagctggaaaaacagtagccagcccctgcagctcaacagagtctttgtcccagaggtctgtcacctccgtgagggattcggcagatgttgactgtgtgctggacctgtctgtcaagtccagcctttcaggagttgaaaatctgaacagctcttatttctcttcacaggacgtgctgagaagcaacctggtgcaggtgaaggtggagaaagaggcttcctgtgatgagagtgatgttggcactaatgactatgacatggaacatagcactgtgaaagaaagtgtgagcactaataacagggtacagtatgagccggcccatctggctcccctgagggaggactcggtcttgagggagctggaccgggaggacaaagccagtgatgatgagatgatgaccccagagagcgagcgtgtccaggtggagggaggcatggagagcagtctgctcccctacgtctccaacatcctgagccccgcgggccagatcttcatgtgccccctgtgcaacaaggtcttccccagcccccacatcctgcagatccacctgagcacgcacttccgcgagcaggacggcatccgcagcaagcccgccgccgatgtcaacgtgcccacgtgctcgctgtgtgggaagactttctcttgcatgtacaccctcaagcgccacgagaggactcactcgggggagaagccctacacatgcacccagtgcggcaagagcttccagtactcgcacaacctgagccgccatgccgtggtgcacacccgcgagaagccgcacgcctgcaagtggtgcgagcgcaggttcacgcagtccggggacctgtacagacacattcgcaagttccactgtgagttggtgaactccttgtcggtcaaaagcgaagcactgagcttgcctactgtcagagactggaccttagaagatagctctcaagaactttggaaataattttatatatatataaataatatatatatatatacatatatataaatagatctctatatagttgtggtacggtctaaaagcagtcttgtttcctggaaataaaaagttgggatattaacttgtttttgcactttagaatagcatgagaatctcactaatttagcattctgataaaagaaactttagagcaagtcagaatagagaggtgtttttcctttgaggggataggggaagtaagccaataagaaccttttaaacaaatcgtcctgtcacaaaatgctttcatatggcttaattttgtcaacactgcattgtcttttgagctcttttttcccccccaacaaagtttttttgttttttgtttttttttttaagtagaaattccctccagttttattagcctctttatatgtctcaaattgcatgaattttttctggctgttggaaacctgaatgcttttagacccaaatggaaaatttctgaaatgctggattatctatttttaaacaagcagttgacttaaaactttctgtggcaacttctggttttctgacagttcccagtgagagaaatgctgaaagtacactgggatcactgggacactgtcttatgaaggtttgcttgggatgaaaaaggatattgcagcttcagcagtgttgaactgtgtgtttaaaaatgtgaattactgttattgtatactgtaattgattacatgggctgggggggtgtcaaagaacttgacaggttgtgttgatgctcttagttgagtcttgaaaagtaaatattaacgctacagaaatgcatgagttttcaatatattttttgtctttgtttgcattgtataactttaacgagtgagtttaaaattatttaatttccttagaaaaatagcaccatttggaaaaaaaaactggtgttatgaagaacgtaaatgcactgtttttatttttattttatataatttaaattgactttcccactgtctttaagttgaaactgttaagctgaataaaaacttaagctgcaaattgataacttcgctacataacaaggaaaatataaatgtttacaaacagcttaaagatttgcatgtgcagtgtgcatttataacaaacttctaattgcacaaaacccatgccagctcagagtttaggtgtacacatttacccagttgagcgttcttagaataactactgcacaagttgacaataggtcgttctctctttttttttgtttgctccctttttctttttctccccttcctccttaccctccctcccttactctccccccccaccaccaccctccacccccaactcatgaaaagattctatggactgaaaaagccccaggctgaaaggactggactgccttgattgacatggggaagggggttagtagactatgtggattgcggcagcagaggctgcagcctaacgtgtggttttaatgaccagcacgcaaggcaaaagcattttgcacagtgtttgttttcctgtcttgcacttacaaataaggtctatgggagtagcatggaaaacgtttgctgtttttcccttttttttttaattgcttttgtttaaaatttgatcgccttaactactgtaaacatagcctatttttgtgcttaagatactgaatggaaaactccattgtgtgttgctggactgttttggaaatatttggttaaatgtgtgttaatttggctgtaatggcatttaaagcaaacaaacaaacaaaaaaagctgtgaaaatggccttggagcattatctttagttacttgaagagtttctagtttttttaaaatacagtttatgttaaaataatttttattaatttagagaagacaatcaatgtctgtgagaaaacggactttcttttggattttctttttgtggtcattgtgagtgattgctttttccttttcttagtttcacattcttcctttgttctaaaacttagactgacatctagctttgacaatcatagtatgttttattttcctgagggggaataacttataatgctgtttagttttgtactattggtgtgttggtgaatttttaaactgtgtgctaactgcaataaattatatgaactgagaaaaaaaaaaaaaaaaaaaaaaaaaaaaaaaaaaaaaaaaaaaaaaaaa

SEQ ID NO: 545 - protein, 463 aa, Homo sapiens
MGAGPSLLLAALLLLLSGDGAVRCDTPANCTYLDLLGTWVFQVGSSGSQRDVNCSVMGPQEKKVVVYLQKLDTAYDDLGNSGHFTIIYNQGFEIVLNDYKWFAFFKYKEEGSKVTTYCNETMTGWVHDVLGRNWACFTGKKVGTASENVYVNTAHLKNSQEKYSNRLYKYDHNFVKAINAIQKSWTATTYMEYETLTLGDMIRRSGGHSRKIPRPKPAPLTAEIQQKILHLPTSWDWRNVHGINFVSPVRNQASCGSCYSFASMGMLEARIRILTNNSQTPILSPQEVVSCSQYAQGCEGGFPYLIAGKYAQDFGLVEEACFPYTGTDSPCKMKEDCFRYYSSEYHYVGGFYGGCNEALMKLELVHHGPMAVAFEVYDDFLHYKKGIYHHTGLRDPFNPFELTNHAVLLVGYGTDSASGMDYWIVKNSWGTGWGENGYFRIRRGTDECAIESIAVAATPIPKL

SEQ ID NO: 546 - DNA, 1904 bp, Homo sapiens
agctatttcaaggcgcgcgcctcgtggtggactcaccgctagcccgcagcgctcggcttcctggtaattcttcacctcttttctcagctccctgcagcatgggtgctgggccctccttgctgctcgccgccctcctgctgcttctctccggcgacggcgccgtgcgctgcgacacacctgccaactgcacctatcttgacctgctgggcacctgggtcttccaggtgggctccagcggttcccagcgcgatgtcaactgctcggttatgggaccacaagaaaaaaaagtagtggtgtaccttcagaagctggatacagcatatgatgaccttggcaattctggccatttcaccatcatttacaaccaaggctttgagattgtgttgaatgactacaagtggtttgccttttttaagtataaagaagagggcagcaaggtgaccacttactgcaacgagacaatgactgggtgggtgcatgatgtgttgggccggaactgggcttgtttcaccggaaagaaggtgggaactgcctctgagaatgtgtatgtcaacacagcacaccttaagaattctcaggaaaagtattctaataggctctacaagtatgatcacaactttgtgaaagctatcaatgccattcagaagtcttggactgcaactacatacatggaatatgagactcttaccctgggagatatgattaggagaagtggtggccacagtcgaaaaatcccaaggcccaaacctgcaccactgactgctgaaatacagcaaaagattttgcatttgccaacatcttgggactggagaaatgttcatggtatcaattttgtcagtcctgttcgaaaccaagcatcctgtggcagctgctactcatttgcttctatgggtatgctagaagcgagaatccgtatactaaccaacaattctcagaccccaatcctaagccctcaggaggttgtgtcttgtagccagtatgctcaaggctgtgaaggcggcttcccataccttattgcaggaaagtacgcccaagattttgggctggtggaagaagcttgcttcccctacacaggcactgattctccatgcaaaatgaaggaagactgctttcgttattactcctctgagtaccactatgtaggaggtttctatggaggctgcaatgaagccctgatgaagcttgagttggtccatcatgggcccatggcagttgcttttgaagtatatgatgacttcctccactacaaaaaggggatctaccaccacactggtctaagagaccctttcaacccctttgagctgactaatcatgctgttctgcttgtgggctatggcactgactcagcctctgggatggattactggattgttaaaaacagctggggcaccggctggggtgagaatggctacttccggatccgcagaggaactgatgagtgtgcaattgagagcatagcagtggcagccacaccaattcctaaattgtagggtatgccttccagtatttcataatgatctgcatcagttgtaaaggggaattggtatattcacagactgtagactttcagcagcaatctcagaagcttacaaatagatttccatgaagatatttgtcttcagaattaaaactgcccttaattttaatatacctttcaatcggccactggccatttttttctaagtattcaattaagtgggaattttctggaagatggtcagctatgaagtaatagagtttgcttaatcatttgtaattcaaacatgctatattttttaaaatcaatgtgaaaacatagacttatttttaaattgtaccaatcacaagaaaataatggcaataattatcaaaacttttaaaatagatgctcatatttttaaaataaagttttaaaaataactgca

SEQ ID NO: 547 - protein, 562 aa, Homo sapiens
MDAMKRGLCCVLLLCGAVFVSPSQEIHARFRRGARSYQVICRDEKTQMIYQQHQSWLRPVLRSNRVEYCWCNSGRAQCHSVPVKSCSEPRCFNGGTCQQALYFSDFVCQCPEGFAGKCCEIDTRATCYEDQGISYRGTWSTAESGAECTNWNSSALAQKPYSGRRPDAIRLGLGNHNYCRNPDRDSKPWCYVFKAGKYSSEFCSTPACSEGNSDCYFGNGSAYRGTHSLTESGASCLPWNSMILIGKVYTAQNPSAQALGLGKHNYCRNPDGDAKPWCHVLKNRRLTWEYCDVPSCSTCGLRQYSQPQFRIKGGLFADIASHPWQAAIFAKHRRSPGERFLCGGILISSCWILSAAHCFQERFPPHHLTVILGRTYRVVPGEEEQKFEVEKYIVHKEFDDDTYDNDIALLQLKSDSSRCAQESSVVRTVCLPPADLQLPDWTECELSGYGKHEALSPFYSERLKEAHVRLYPSSRCTSQHLLNRTVTDNMLCAGDTRSGGPQANLHDACQGDSGGPLVCLNDGRMTLVGIISWGLGCGQKDVPGVYTKVTNYLDWIRDNMRP

SEQ ID NO: 548 - DNA, 2653 bp, Homo sapiens
atggccctgtccactgagcatcctcccgccacacagaaacccgcccagccggggccaccgaccccaccccctgcctggaaacttaaggaggccggagctgtggggagctcagagctgagatcctacaggagtccagggctggagagaaaacctctgcgaggaaagggaaggagcaagccgtgaatttaagggacgctgtgaagcaatcatggatgcaatgaagagagggctctgctgtgtgctgctgctgtgtggagcagtcttcgtttcgcccagccaggaaatccatgcccgattcagaagaggagccagatcttaccaagtgatctgcagagatgaaaaaacgcagatgatataccagcaacatcagtcatggctgcgccctgtgctcagaagcaaccgggtggaatattgctggtgcaacagtggcagggcacagtgccactcagtgcctgtcaaaagttgcagcgagccaaggtgtttcaacgggggcacctgccagcaggccctgtacttctcagatttcgtgtgccagtgccccgaaggatttgctgggaagtgctgtgaaatagataccagggccacgtgctacgaggaccagggcatcagctacaggggcacgtggagcacagcggagagtggcgccgagtgcaccaactggaacagcagcgcgttggcccagaagccctacagcgggcggaggccagacgccatcaggctgggcctggggaaccacaactactgcagaaacccagatcgagactcaaagccctggtgctacgtctttaaggcggggaagtacagctcagagttctgcagcacccctgcctgctctgagggaaacagtgactgctactttgggaatgggtcagcctaccgtggcacgcacagcctcaccgagtcgggtgcctcctgcctcccgtggaattccatgatcctgataggcaaggtttacacagcacagaaccccagtgcccaggcactgggcctgggcaaacataattactgccggaatcctgatggggatgccaagccctggtgccacgtgctgaagaaccgcaggctgacgtgggagtactgtgatgtgccctcctgctccacctgcggcctgagacagtacagccagcctcagtttcgcatcaaaggagggctcttcgccgacatcgcctcccacccctggcaggctgccatctttgccaagcacaggaggtcgcccggagagcggttcctgtgcgggggcatactcatcagctcctgctggattctctctgccgcccactgcttccaggagaggtttccgccccaccacctgacggtgatcttgggcagaacataccgggtggtccctggcgaggaggagcagaaatttgaagtcgaaaaatacattgtccataaggaattcgatgatgacacttacgacaatgacattgcgctgctgcagctgaaatcggattcgtcccgctgtgcccaggagagcagcgtggtccgcactgtgtgccttcccccggcggacctgcagctgccggactggacggagtgtgagctctccggctacggcaagcatgaggccttgtctcctttctattcggagcggctgaaggaggctcatgtcagactgtacccatccagccgctgcacatcacaacatttacttaacagaacagtcaccgacaacatgctgtgtgctggagacactcggagcggcgggccccaggcaaacttgcacgacgcctgccagggcgattcgggaggccccctggtgtgtctgaacgatggccgcatgactttggtgggcatcatcagctggggcctgggctgtggacagaaggatgtcccgggtgtgtacaccaaggttaccaactacctagactggattcgtgacaacatgcgaccgtgaccaggaacacccgactcctcaaaagcaaatgagatcccgcctcttcttcttcagaagacactgcaaaggcgcagtgcttctctacagacttctccagacccaccacaccgcagaagcgggacgagaccctacaggagagggaagagtgcattttcccagatacttcccattttggaagttttcaggacttggtctgatttcaggatactctgtcagatgggaagacatgaatgcacactagcctctccaggaatgcctcctccctgggcagaaagtggccatgccaccctgttttcagctaaagcccaacctcctgacctgtcaccgtgagcagctttggaaacaggaccacaaaaatgaaagcatgtctcaatagtaaaagataacaagatctttcaggaaagacggattgcattagaaatagacagtatatttatagtcacaagagcccagcagggcctcaaagttggggcaggctggctggcccgtcatgttcctcaaaagcacccttgacgtcaagtctccttcccctttccccactccctggctctcagaaggtattccttttgtgtacagtgtgtaaagtgtaaatcctttttctttataaactttagagtagcatgagagaattgtatcatttgaacaactaggcttcagcatatttatagcaatccatgttagtttttactttctgttgccacaaccctgttttatactgtacttaataaattcagatatatttttcacagtttttcc

SEQ ID NO: 549 - protein, 465 aa, Homo sapiens
MASQLTQRGALFLLFFLTPAVTPTWYAGSGYYPDESYNEVYAEEVPQAPALDYRVPRWCYTLNIQDGEATCYSPKGGNYHSSLGTRCELSCDRGFRLIGRRSVQCLPSRRWSGTAYCRQMRCHALPFITSGTYTCTNGVLLDSRCDYSCSSGYHLEGDRSRICMEDGRWSGGEPVCVDIDPPKIRCPHSREKMAEPEKLTARVYWDPPLVKDSADGTITRVTLRGPEPGSHFPEGEHVIRYTAYDRAYNRASCKFIVKVQVRRCPTLKPPQHGYLTCTSAGDNYGATCEYHCDGGYDRQGTPSRVCQSSRQWSGSPPICAPMKINVNVNSAAGLLDQFYEKQRLLIISAPDPSNRYYKMQISMLQQSTCGLDLRHVTIIELVGQPPQEVGRIREQQLSANIIEELRQFQRLTRSYFNMVLIDKQGIDRDRYMEPVTPEEIFTFIDDYLLSNQELTQRREQRDICE

SEQ ID NO: 550 - DNA, 2133 bp, Homo sapiens
ctgagttcctctaatccctgtgttccttctcccccatctttctaaaacccttctctgagagaggaataactatagcttcagggataatatagctttaaggaaacttttggcagatgtggacgtcgtaacatctgggcagtgttaacagaatcccggaggccgggacagaccaggagccactcgttctaggaatgttaaagtagaaggttttttccaattgatgagaggagcagagaggaaggagaaagaggaggagagagaaaaagggcacaaaataccataaaacagatcccatatttctgcttcccctcacttttagaagttaattgatggctgacttctgaaagtcactttcctttgccctggtacttcaggccatatacatcttttcttgtctccataatcctccctttcaaggatggccagtcagctaactcaaagaggagctctctttctgctgttcttcctaactccggcagtgacaccaacatggtatgcaggttctggctactatccggatgaaagctacaatgaagtatatgcagaggaggtcccacaggctcctgccctggactaccgagtcccccgatggtgttatacattaaatatccaggatggagaagccacatgctactcaccgaagggaggaaattatcacagcagcctgggcacgcgttgtgagctctcctgtgaccggggctttcgattgattggaaggaggtcggtgcaatgcctgccaagccgtcgttggtctggaactgcctactgcaggcagatgagatgccacgcactaccattcatcactagtggcacttacacctgcacaaatggagtgcttcttgactctcgctgtgactacagctgttccagtggctaccacctggaaggtgatcgcagccgaatctgcatggaagatgggagatggagtggaggcgagcctgtatgtgtagacatagatccccccaagatccgctgtccccactcacgtgagaagatggcagagccagagaaattgactgctcgagtatactgggacccaccgttggtgaaagattctgctgatggtaccatcaccagggtgacacttcggggccctgagcctggctctcactttcccgaaggagagcatgtgattcgttacactgcctatgaccgagcctacaaccgggccagctgcaagttcattgtgaaagtacaagtgagacgctgcccaactctgaaacctccgcagcacggctacctcacctgcacctcagcgggggacaactatggtgccacctgtgaataccactgtgatggcggttatgatcgccaggggacaccctcccgggtctgtcagtccagccgccagtggtcaggttcaccaccaatctgtgctcctatgaagattaacgtcaacgtcaactcagctgctggtctcttggatcaattctatgagaaacagcgactcctcatcatctcagctcctgatccttccaaccgatattataaaatgcagatctctatgctacagcaatccacctgtggactggatttgcggcatgtgaccatcattgaactggtgggacagccacctcaggaggtggggcgcatccgggagcaacagctgtcagccaacatcatcgaggagctcaggcaatttcagcgcctcactcgctcctacttcaacatggtgttgattgacaagcagggtattgaccgagaccgctacatggaacctgtcacccccgaggaaatcttcacattcattgatgactacctactgagcaatcaggagttgacccagcgtcgggagcaaagggacatatgcgagtgaacttgagccagggcatggttaaagtcaagggaaaagctcctctagttagctgaaactgggacctaataaaaggaggaaatgttttcccacagttctagggacaggactctgaggtgggtgagtttgacaaatcctgcagtgtttccaggcatccttttaggactgtgtaatagtttccctagaagctaggtagggactgaggacaggccttgggcagtgggttgggggtagaagttcttcctttcctaacccgggcccctgcccagctctccaaagtctttcagaaaagtaaatcctaaattcagtgaaaaaaaaac

SEQ ID NO: 551 - protein, 673 aa, Homo sapiens
MAKPAQGAKYRGSIHDFPGFDPNQDAEALYTAMKGFGSDKEAILDIITSRSNRQRQEVCQSYKSLYGKDLIADLKYELTGKFERLIVGLMRPPAYCDAKEIKDAISGIGTDEKCLIEILASRTNEQMHQLVAAYKDAYERDLEADIIGDTSGHFQKMLVVLLQGTREEDDVVSEDLVQQDVQDLYEAGELKWGTDEAQFIYILGNRSKQHLRLVFDEYLKTTGKPMKASIRGELSGDFEKLMLAVVKCIRSTPEYFAERLFKAMKGLGTRDNTLIRIMVSRSELDMLDIREIFRTKYEKSLYSMIKNDTSGEYKKTLLKLSGGDDDAAGQFFPEAAQVAYQMWELSAVARVELKGTVRPANDFNPDADAKALRKAMKGLGTDEDTIIDIITHRSNVQRQQIRQTFKSHFGRDLMTDLKSEISGDLARLILGLMMPPAHYDAKQLKKAMEGAGTDEKALIEILATRTNAEIRAINEAYKEDYHKSLEDALSSDTSGHFRRILISLATGHREEGGENLDQAREDAQVAAEILEIADTPSGDKTSLETRFMTILCTRTYPHLRRVFQEFIKMTNYDVEHTIKKEMSGDVRDAFVAIVQSVKNKPLFFADKLYKSMKGAGTDEKTLTRIMVSRSEIDLLNIRREFIEKYDKSLHQAIEGDTSGDFLKALLALCGGED

SEQ ID NO: 552 - DNA, 2528 bp, Homo sapiens
gccacgtgtccggctcggagcccacggctgtcctcccggtccgcgccgctgcggttgctgctgggctaacgggctccgatccagcgagcgctgcgtcctcgagtccgcccgtgcgggcgcagggacccgaggcctccgctgcggctggattctgctgcgaaccggagaccatggccaaaccagcacagggtgccaagtaccggggctccatccatgacttcccaggctttgaccccaaccaggatgccgaggctctgtacactgccatgaagggctttggcagtgacaaggaggccatactggacataatcacctcacggagcaacaggcagaggcaggaggtctgccagagctacaagtccctctacggcaaggacctcattgctgatttaaagtatgaattgacgggcaagtttgaacggttgattgtgggcctgatgaggccacctgcctattgtgatgccaaagaaattaaagatgccatctcgggcattggcactgatgagaagtgcctcattgagatcttggcttcccggaccaatgagcagatgcaccagctggtggcagcatacaaagatgcctacgagcgggacctggaggctgacatcatcggcgacacctctggccacttccagaagatgcttgtggtcctgctccagggaaccagggaggaggatgacgtagtgagcgaggacctggtacaacaggatgtccaggacctatacgaggcaggggaactgaaatggggaacagatgaagcccagttcatttacatcttgggaaatcgcagcaagcagcatcttcggttggtgttcgatgagtatctgaagaccacagggaagccgatgaaggccagcatccgaggggagctgtctggggactttgagaagctaatgctggccgtagtgaagtgtatccggagcaccccggaatattttgctgaaaggctcttcaaggctatgaagggcctggggactcgggacaacaccctgatccgcatcatggtctcccgtagtgagttggacatgctcgacattcgggagatcttccggaccaagtatgagaagtccctctacagcatgatcaagaatgacacctctggcgagtacaagaagactctgctgaagctgtctgggggagatgatgatgctgctggccagttcttcccggaggcagcgcaggtggcctatcagatgtgggaacttagtgcagtggcccgagtagagctgaagggaactgtgcgcccagccaatgacttcaaccctgacgcagatgccaaagcgctgcggaaagccatgaagggactcgggactgacgaagacacaatcatcgatatcatcacgcaccgcagcaatgtccagcggcagcagatccggcagaccttcaagtctcactttggccgggacttaatgactgacctgaagtctgagatctctggagacctggcaaggctgattctggggctcatgatgccaccggcccattacgatgccaagcagttgaagaaggccatggagggagccggcacagatgaaaaggctcttattgaaatcctggccactcggaccaatgctgaaatccgggccatcaatgaggcctataaggaggactatcacaagtccctggaggatgctctgagctcagacacatctggccacttcaggaggatcctcatttctctggccacggggcatcgtgaggagggaggagaaaacctggaccaggcacgggaagatgcccaggtggctgctgagatcttggaaatagcagacacacctagtggagacaaaacttccttggagacacgtttcatgacgatcctgtgtacccggacgtatccgcacctccggagagtcttccaggagttcatcaagatgaccaactatgacgtggagcacaccatcaagaaggagatgtctggggatgtcagggatgcatttgtggccattgttcaaagtgtcaagaacaagcctctcttctttgccgacaaactttacaaatccatgaagggtgctggcacagatgagaagactctgaccaggatcatggtatcccgcagtgagattgacctgctcaacatccggagggaattcattgagaaatatgacaagtctctccaccaagccattgagggtgacacctccggagacttcctgaaggccttgctggctctctgtggtggtgaggactagggccacagctttggcgggcacttctgccaagaaatggttatcagcaccagccgccatggccaagcctgattgttccagctccagagactaaggaaggggcaggggtggggggaggggttgggttgggctcttatcttcatggagcttaggaaacgctcccactcccacgggccatcgagggccagcacggctgagcggtgaaaaaccgtagccatagatcctgtccacctccactcccctctgaccctcaggctttcccagcttcctccccttgctacagcctctgccctggtttggctatgtcagatccaataaacatcctgaacctctgtctgt

SEQ ID NO: 553 - protein, 346 aa, Homo sapiens
MARPGQRWLGKWLVAMVVWALCRLATPLAKNLEPVSWSSLNPKFLSGKGLVIYPKIGDKLDIICPRAEAGRPYEYYKLYLVRPEQAAACSTVLDPNVLVTCNRPEQEIRFTIKFQEFSPNYMGLEFKKHHDYYITSTSNGSLEGLENREGGVCRTRTMKIIMKVGQDPNAVTPEQLTTSRPSKEADNTVKMATQAPGSRGSLGDSDGKHETVNQEEKSGPGASGGSSGDPDGFFNSKVALFAAVGAGCVIFLLIIIFLTVLLLKLRKRHRKHTQQRAAALSLSTLASPKGGSGTAGTEPSDIIIPLRTTENNYCPHYEKVSGDYGHPVYIVQEMPPQSPANIYYKV

SEQ ID NO: 554 - DNA, 3315 bp, Homo sapiens
gcacagcggcagcggagggagtctatgcgagctggacagcagtgggaggtttgtgaggctcgcactggccgcagaccctcgggctcgatcgcccgggagccaggactcggcgacgcgaggctgccgggctacccggccgaggcttcgggggcgcaaactaatgggactggctcgctcggcagcatctccccgctcttctaagtacactgagcagggcccgcgctgaagtagaagctgtccgggggcgcgtagcccggagtcccagtgtggcccggaggaacggagcccgtgccagggcggcccagtcgggagcccggggaccgagcttgtgctgtggggaaacccccacttcttccaagggacagcgatcccgggacggtcgaggcgtcggggcggtcaccgagacctctgcgggaagaccccgtcggggagagggcgcgcagccccgaagcgtctcgggaagtcgagcggaatcgggcgggatcacccgggggcgcagagcccccgtcgcgcctcgtgcggcagcggagagcccaggagaacgagccctcgggggccgaagcccatgcccgggttgggggcggctgcccagtgagtcctcctggccggccgggcggagaagagcgacaccgaagccggcgggaggggagcacttcaaggccggcggctgcggaggatgggcgcctgagcggctccgagcgcagcgcggcagaggaaggcgaggcgagctttggtgaggaggcgccaagggatcccgaagtgcagtctgcccccgggaagatggctcggcctgggcagcgttggctcggcaagtggcttgtggcgatggtcgtgtgggcgctgtgccggctcgccacaccgctggccaagaacctggagcccgtatcctggagctccctcaaccccaagttcctgagtgggaagggcttggtgatctatccgaaaattggagacaagctggacatcatctgcccccgagcagaagcagggcggccctatgagtactacaagctgtacctggtgcggcctgagcaggcagctgcctgtagcacagttctcgaccccaacgtgttggtcacctgcaataggccagagcaggaaatacgctttaccatcaagttccaggagttcagccccaactacatgggcctggagttcaagaagcaccatgattactacattacctcaacatccaatggaagcctggaggggctggaaaaccgggagggcggtgtgtgccgcacacgcaccatgaagatcatcatgaaggttgggcaagatcccaatgctgtgacgcctgagcagctgactaccagcaggcccagcaaggaggcagacaacactgtcaagatggccacacaggcccctggtagtcggggctccctgggtgactctgatggcaagcatgagactgtgaaccaggaagagaagagtggcccaggtgcaagtgggggcagcagcggggaccctgatggcttcttcaactccaaggtggcattgttcgcggctgtcggtgccggttgcgtcatcttcctgctcatcatcatcttcctgacggtcctactactgaagctacgcaagcggcaccgcaagcacacacagcagcgggcggctgccctctcgctcagtaccctggccagtcccaaggggggcagtggcacagcgggcaccgagcccagcgacatcatcattcccttacggactacagagaacaactactgcccccactatgagaaggtgagtggggactacgggcaccctgtctacatcgtccaagagatgccgccccagagcccggcgaacatctactacaaggtctgagtgcccggcacggcctcaggcccccgagggacagtcggcctggaccggacctctcctttcgcccccacaccccctccccttgccagctgtgcccacctttgtatttagttttgtagtttcttggcttttataatccccctttttccctgccccctgggcttcggaggggggtgcttgtgcccctaacccccatgctcttgtgccttccccctctggccaggcctctgggctccgtgggggcgccccttcttggaaggcagggctggacactgatggacagcaggcagggagacagtcccctggccctgcccctccctcgccccccttgccaccttcccaggactgcttgtccgctatcatcactgtttttaatgcttttgtgttcattttttagctgtcaactcattttcatctgttttttgaagaaaaatggaaaaatgtaaaaggcagcccctccccaggctttgtgagcctggcccaagccagtacaagagggcctggggcacgatgtggtcagccaggaagcataggatgccatttcttttatagattccttggtatttctggtggggtaaggggcaggccagggctgttcacgcccatgagggaagaggaaagtgccactgggcaaggtgtcccaccctcccctcctgaccctcctacgaggcttatcctggcaatggggtagtcactgccacccttccacacacacacacacacacacacacacacaaaaatcccttccttgtgggattcttgggcatctcctgcctccctcactctcacggtaattaatgtcttaattggctgttgcctggggaacaggagagctgctgcaggcagatgacctcatggggggtggagggaggtgaggtgcccaggtggctatttgccctgcagagctgggagtttcacccccaccccccaccctgttctctccttacctttggcatcctttggcctggtggggaaacagaggcccagggtggagacctaagcgggtataagaccaggtggcctgctccttttctgggccctagcacaggtgggtaacccccacccaacccagctcctgctgctgtcccagtcttgggctggggcctggaaagaggaagaggctgcctggggctgggccagcccgctgtgcactttgaccccagttccttgccagcacggctgctaacagactgccacttgagtgcgccttgcaggcactcccagagcagccatggaaggagctggccctcacaccatccacctccacactgcctcctggccagctgcccaccccagtgccaggtgggagagggagcagaacagccagccccttccaggtggcagtcggaagggtttttgtttttgtttctgttgccatttgtgtaaatactagtctttttggaaaaaaaataatgtaaagatgttttgtataaactctgaattattttcttgttgcttttttcttagaaaaaaatgagaactaaaaaaaaaaaaaaa

SEQ ID NO: 555 - protein, 347 aa, Homo sapiens
MTLDHQIINPTLKWSQPAVPSGGPLVQHAHTTLDSDAGLTENPLTKLLAIGKEDDNAQWHMEDVIEDIIGMESSFKEEGADSPLLMQRTLSGSILDVYSGEQGISPINMGLTSASCPSSLPMKREITETDTRALAKERQKKDNHNLIERRRRYNINYRIKELGTLIPKSNDPDMRWNKGTILKASVEYIKWLQKEQQRARELEHRQKKLEQANRRLLLRIQELEIQARTHGLPTLASLGTVDLGAHVTKQQSHPEQNSVDYCQQLTVSQGPSPELCDQAIAFSDPLSYFTDLSFSAALKEEQRLDGMLLDDTISPFGTDPLLSATSPAVSKESSRRSSFSSDDGDEL

SEQ ID NO: 556 - DNA, 1805 bp, Homo sapiens
tgtttactttggttgtcccttctggcatggtgcatatgttatgggaagagggattataatttggtgctgtttgtagagatgacaacactgataaaatccactcattgctggtcccagcacacctggaaagttctgcaaggcctcagctacagaaagcccagagacagaaagtaaactctttcatgacccttgatcatcagatcatcaatccaactcttaaatggtcacaacctgcagtgccaagtggtgggcctcttgtgcagcatgcacacacaactctggacagtgatgctggcctcacagaaaacccactcaccaagttactagctattgggaaagaagatgacaatgcacaatggcatatggaggacgttattgaggatataatcggtatggaatcaagttttaaagaggaaggagcagactctcctctgctaatgcaaagaacattatctggaagtattttggatgtgtatagcggtgaacaaggaatttcaccaattaacatggggcttacaagtgcttcttgtccaagtagtctaccaatgaaaagagaaattacagaaactgacactagagctttagcaaaagagagacaaaaaaaggacaaccacaacctcattgaaagaagaagaaggtataatattaattaccgaatcaaggagcttggcactcttattccaaagtctaatgatcctgatatgcgctggaacaaaggaaccattctaaaagcatcagtggagtacatcaagtggctacaaaaagaacaacagagagcccgagaattggaacacagacagaagaaattagagcaggctaacaggcgacttctacttcggattcaggaactagaaattcaggctcgtactcatggtctgccaaccctggcttcacttggcacggttgatttaggtgctcatgtcaccaaacagcagagccatcctgagcagaattcagtagactattgccaacaactgactgtgtctcaggggccaagccctgagctctgtgatcaagctatagccttttctgatcctttgtcatacttcacagatttatcatttagtgctgcattgaaagaggaacaaagattggatggcatgctattggatgacacaatctctccatttggaacagatcctctgctatctgccacttcccctgcagtttccaaagaaagcagtaggagaagtagctttagctcagatgatggtgatgaattataagaaataaacagacccaattcatcaactggaaagcaattctatgctggtgctatgcaattatgctctgtgtttcatatgttgctttggcttattttttttcttaaaggaatgtgttgttcatgaaaaactgatagaagcaacagaagaattcgcaggaagaaaaatcatagtgttaatgaattattgagggcgaaaaaaaggtgttttcttctttgactacggagtccaaatccacttaaattctgttttcctgaaaagaggtacagcataagaaatagctctttattgatgttttaaaagcagcaacttggtggtgtactactggaactaatgactgcaaagtgttaaacgactgaaatatacaaacagtctcttagttactcatttccatcttctcttcaactttcacatcagtcttccggaatcaagatcaacatatcaggtggtcattgcctttctccattgtctagtagacatgtctaaagttcaaactttataggataaataaatgtataatagattatctgtcacttgtggttgaaaggcaaatctacaataaatgtgagaattttccacaat

SEQ ID NO: 557 - protein, 99 aa, Homo sapiens; identical to SEQ ID NO: 541

SEQ ID NO: 558 - DNA, 757 bp, Homo sapiens
ggaaccgagaggctgagactaacccagaaacatccaattctcaaactgaagctcgcactctcgcctccagcatgaaagtctctgccgcccttctgtgcctgctgctcatagcagccaccttcattccccaagggctcgctcagccagatgcaatcaatgccccagtcacctgctgttataacttcaccaataggaagatctcagtgcagaggctcgcgagctatagaagaatcaccagcagcaagtgtcccaaagaagctgtgatcttcaagaccattgtggccaaggagatctgtgctgaccccaagcagaagtgggttcaggattccatggaccacctggacaagcaaacccaaactccgaagacttgaacactcactccacaacccaagaatctgcagctaacttattttcccctagctttccccagacaccctgttttattttattataatgaattttgtttgttgatgtgaaacattatgccttaagtaatgttaattcttatttaagttattgatgttttaagtttatctttcatggtactagtgttttttagatacagagacttggggaaattgcttttcctcttgaaccacagttctacccctgggatgttttgagggtctttgcaagaatcattaatacaaagaattttttttaacattccaatgcattgctaaaatattattgtggaaatgaatattttgtaactattacaccaaataaatatatttttgtacaaaaaaaaaaaaaa

SEQ ID NO: 559 - protein, 238 aa, Homo sapiens
MLTTLLPILLLSGWAFCSQDASDGLQRLHMLQISYFRDPYHVWYQGNASLGGHLTHVLEGPDTNTTIIQLQPLQEPESWARTQSGLQSYLLQFHGLVRLVHQERTLAFPLTIRCFLGCELPPEGSRAHVFFEVAVNGSSFVSFRPERALWQADTQVTSGVVTFTLQQLNAYNRTRYELREFLEDTCVQYVQKHISAENTKGSQTSRSYTSLVLGVLVGGFIIAGVAVGIFLCTGGRRC

SEQ ID NO: 560 - DNA, 1381 bp, Homo sapiens
cttctcttttccctagactgcagccagcggagcccgcagccggcccgagccaggaacccaggtccggagcctcaacttcaggatgttgacaacattgctgccgatactgctgctgtctggctgggccttttgtagccaagacgcctcagatggcctccaaagacttcatatgctccagatctcctacttccgcgacccctatcacgtgtggtaccagggcaacgcgtcgctggggggacacctaacgcacgtgctggaaggcccagacaccaacaccacgatcattcagctgcagcccttgcaggagcccgagagctgggcgcgcacgcagagtggcctgcagtcctacctgctccagttccacggcctcgtgcgcctggtgcaccaggagcggaccttggcctttcctctgaccatccgctgcttcctgggctgtgagctgcctcccgagggctctagagcccatgtcttcttcgaagtggctgtgaatgggagctcctttgtgagtttccggccggagagagccttgtggcaggcagacacccaggtcacctccggagtggtcaccttcaccctgcagcagctcaatgcctacaaccgcactcggtatgaactgcgggaattcctggaggacacctgtgtgcagtatgtgcagaaacatatttccgcggaaaacacgaaagggagccaaacaagccgctcctacacttcgctggtcctgggcgtcctggtgggcggtttcatcattgctggtgtggctgtaggcatcttcctgtgcacaggtggacggcgatgttaattactctccagccccgtcagaaggggctggattgatggaggctggcaagggaaagtttcagctcactgtgaagccagactccccaactgaaacaccagaaggtttggagtgacagctcctttcttctcccacatctgcccactgaagatttgagggaggggagatggagaggagaggtggacaaagtacttggtttgctaagaacctaagaacgtgtatgctttgctgaattagtctgataagtgaatgtttatctatctttgtggaaaacagataatggagttggggcaggaagcctatggcccatcctccaaagacagacagaatcacctgaggcgttcaaaagatataaccaaataaacaagtcatccacaatcaaaatacaacattcaatacttccaggtgtgtcagacttgggatgggacgctgatataatagggtagaaagaagtaacacgaagaagtggtggaaatgtaaaatccaagtcatatggcagtgatcaattattaatcaattaataatattaataaatttcttatatttaaggcaaaaaaaaaataaaaaaaaaaaaaaaaaaaaaaa

SEQ ID NO: 561 - protein, 687 aa, Homo sapiens
MAEELVLERCDLELETNGRDHHTADLCREKLVVRRGQPFWLTLHFEGRNYQASVDSLTFSVVTGPAPSQEAGTKARFPLRDAVEEGDWTATVVDQQDCTLSLQLTTPANAPIGLYRLSLEASTGYQGSSFVLGHFILLFNAWCPADAVYLDSEEERQEYVLTQQGFIYQGSAKFIKNIPWNFGQFQDGILDICLILLDVNPKFLKNAGRDCSRRSSPVYVGRVGSGMVNCNDDQGVLLGRWDNNYGDGVSPMSWIGSVDILRRWKNHGCQRVKYGQCWVFAAVACTVLRCLGIPTRVVTNYNSAHDQNSNLLIEYFRNEFGEIQGDKSEMIWNFHCWVESWMTRPDLQPGYEGWQALDPTPQEKSEGTYCCGPVPVRAIKEGDLSTKYDAPFVFAEVNADVVDWIQQDDGSVHKSINRSLIVGLKISTKSVGRDEREDITHTYKYPEGSSEEREAFTRANHLNKLAEKEETGMAMRIRVGQSMNMGSDFDVFAHITNNTAEEYVCRLLLCARTVSYNGILGPECGTKYLLNLTLEPFSEKSVPLCILYEKYRDCLTESNLIKVRALLVEPVINSYLLAERDLYLENPEIKIRILGEPKQKRKLVAEVSLQNPLPVALEGCTFTVEGAGLTEEQKTVEIPDPVEAGEEVKVRMDLVPLHMGLHKLVVNFESDKLKAVKGFRNVIIGPA

SEQ ID NO: 562 - DNA, 3257 bp, Homo sapiens
aacaggcgtgacgccagttctaaacttgaaacaaaacaaaacttcaaagtacaccaaaatagaacctccttaaagcataaatctcacggagggtctcggccgccagtggaaggagccaccgcccccgccccgaccatggccgaggagctggtcttagagaggtgtgatctggagctggagaccaatggccgagaccaccacacggccgacctgtgccgggagaagctggtggtgcgacggggccagcccttctggctgaccctgcactttgagggccgcaactaccaggccagtgtagacagtctcaccttcagtgtcgtgaccggcccagcccctagccaggaggccgggaccaaggcccgttttccactaagagatgctgtggaggagggtgactggacagccaccgtggtggaccagcaagactgcaccctctcgctgcagctcaccaccccggccaacgcccccatcggcctgtatcgcctcagcctggaggcctccactggctaccagggatccagctttgtgctgggccacttcattttgctcttcaacgcctggtgcccagcggatgctgtgtacctggactcggaagaggagcggcaggagtatgtcctcacccagcagggctttatctaccagggctcggccaagttcatcaagaacataccttggaattttgggcagtttcaagatgggatcctagacatctgcctgatccttctagatgtcaaccccaagttcctgaagaacgccggccgtgactgctcccggcgcagcagccccgtctacgtgggccgggtgggtagtggcatggtcaactgcaacgatgaccagggtgtgctgctgggacgctgggacaacaactacggggacggcgtcagccccatgtcctggatcggcagcgtggacatcctgcggcgctggaagaaccacggctgccagcgcgtcaagtatggccagtgctgggtcttcgccgccgtggcctgcacagtgctgaggtgcctaggcatccctacccgcgtcgtgaccaactacaactcggcccatgaccagaacagcaaccttctcatcgagtacttccgcaatgagtttggggagatccagggtgacaagagcgagatgatctggaacttccactgctgggtggagtcgtggatgaccaggccggacctgcagccggggtacgagggctggcaggccctggacccaacgccccaggagaagagcgaaggaacgtactgctgtggcccagttccagttcgtgccatcaaggagggcgacctgagcaccaagtacgatgcgccctttgtctttgcggaggtcaatgccgacgtggtagactggatccagcaggacgatgggtctgtgcacaaatccatcaaccgttccctgatcgttgggctgaagatcagcactaagagcgtgggccgagacgagcgggaggatatcacccacacctacaaatacccagaggggtcctcagaggagagggaggccttcacaagggcgaaccacctgaacaaactggccgagaaggaggagacagggatggccatgcggatccgtgtgggccagagcatgaacatgggcagtgactttgacgtctttgcccacatcaccaacaacaccgctgaggagtacgtctgccgcctcctgctctgtgcccgcaccgtcagctacaatgggatcttggggcccgagtgtggcaccaagtacctgctcaacctaaccctggagcctttctctgagaagagcgttcctctttgcatcctctatgagaaataccgtgactgccttacggagtccaacctcatcaaggtgcgggccctcctcgtggagccagttatcaacagctacctgctggctgagagggacctctacctggagaatccagaaatcaagatccggatccttggggagcccaagcagaaacgcaagctggtggctgaggtgtccctgcagaacccgctccctgtggccctggaaggctgcaccttcactgtggagggggccggcctgactgaggagcagaagacggtggagatcccagaccccgtggaggcaggggaggaagttaaggtgagaatggacctcgtgccgctccacatgggcctccacaagctggtggtgaacttcgagagcgacaagctgaaggctgtgaagggcttccggaatgtcatcattggccccgcctaagggacccctgctcccagcctgctgagagcccccaccttgatcccaatccttatcccaagctagtgagcaaaatatgccccttattgggccccagaccccagggcagggtgggcagcctatgggggctctcggaaatggaatgtgcccctggcccatctcagcctcctgagcctgtgggtccccactcaccccctttgctgtgaggaatgctctgtgccagaaacagtgggagccctgacctgtgctgactggggctggggtgagagaggaaagacctacattccctctcctgcccagatgccctttggaaagccattgaccacccaccatattgtttgatctacttcatagctccttggagcaggcaaaaaagggacagcatgcccttggctggatcaggaatccagctccctagactgcatcccgtacctcttcccatgactgcacccagctccaggggcccttgggacacccagagctgggtggggacagtgataggcccaaggtcccctccacatcccagcagcccaagcttaatagccctccccctcaacctcaccattgtgaagcacctactatgtgctgggtgcctcccacacttgctggggctcacggggcctccaacccatttaatcaccatgggaaactgttgtgggcgctgcttccaggataaggagactgaggcttagagagaggaggcagccccctccacaccagtggcctcgtggttataagcaaggctgggtaatgtgaaggcccaagagcagagtctgggcctctgactctgagtccactgctccatttataaccccagcctgacctgagactgtcgcagaggctgtctggggcctttatcaaaaaaagactcagccaagacaaggaggtagagaggggactgggggactgggagtcagagccctggctgggttcaggtcccacgtctggccagcgactgccttctcctctctgggcctttgtttccttgttggtcagaggagtgattgaacctgctcatctccaaggatcctctccactccatgtttgcaatacacaattcc

SEQ ID NO: 563 - protein, 61 aa, Homo sapiens
MDPNCSCAAGVSCTCAGSCKCKECKCTSCKKSCCSCCPVGCSKCAQGCVCKGASEKCSCCD

SEQ ID NO: 564 - DNA, 1935 bp, Homo sapiens
tctagacagtggcgcaagagactggggttgcactgggactccaggaaaggcttagctgttgacgaaggaccggggcggggccggggggcggggcgaaggccaggatctccaggtacccggaaccccaaggggcgggtgtagcaggcaatcttggcgaaactgggaagggcgggcaggagggcagggaagccgctcacccaggcacaaagcgcctcccgcttgagcggactccaaagggacggtccgcggtgtgcagcgagctgcgctcaggggaccttgcgcccggcccttctgctgcacacagcccacccaggacctcccgcagcgctgacaggcggggcgggtgcaaagacggggcggggtctctgcgcccggccccctcccctgactatcaaagcagcggccggctgtttgggtccaccacgccttccacctgccccactgcttcttcgcttctctcttggaaagtccagtctctcctcggcttgcaatggaccccaactgctcctgcgccgctggtaaggaacgccgggttccgtgcctggggatgctcgattcccagacaccatagagagtgttcctgggtttgagaaggtcgtattttgagatctcaactgtaggggactccttgacttagtccagtgctttcctcttggccaagatcctgagagcatttccttcctctctgtgcctctgtgtcagcgttgagggtactgaggctcaaggctgtcctgctccacgtcatgcggtttgtcccagggctgttggctgagccccagtgctctgaccaggctttgagcagcaggattagataggaggcaggggacattgcctcttcggggttcaggacagaaagtcgaagtcgccgtcttcccaggctgtgcctggagcctgggactttcctttggagtgcaaacaggaggctgcttggccttcccagcatgaagggagaggacatggggcttctcttcctctgctctgagtgggaaaggagctctgagggctggccccgcacagaggagggggcaatggagactcattaactcactgctgtacctcctgcaggtcactcgccgctcactggcttttttttctctttctcgcaggtgtctcctgcacctgcgctggttcctgcaagtgcaaagagtgcaaatgcacctcctgcaagaagagtgagtgtgaggccatctccatggtctggggctgtggctaaggttgggatggaacccaaggctggccctgagtgcatgcttctggggaactggccttcctttgtccccgtaggttgtcactgcctttctagtcttctgccctgtgcagggcgcctgggcagctttctcataggaagacccaccccagatatttcccagttgtctcctgacaaagccataccctcctgaactgagggtcctttgtggctggaggctctgttgggggcctctgttggggagggaggtccctgggcaagttggctgtgacctctcatgctcctcttcttccccaggctgctgctcctgctgccccgtgggctgtagcaagtgtgcccagggctgtgtttgcaaaggggcgtcagagaagtgcagctgctgcgactgatgccaggacaacctttctcccagatgtaaacagagagacatgtacaaacctggattttttttttataccaccttgacccatttgctacattccttttcctgtgaaatatgtgagtgataattaaacactttagacctgattctgacttcagtttcccttatgtgcttcagaaatcagagactggggtgggggatcgaactagggttgcagactcctgggctctaaatggaaatctgagtccctaacaatcagagtgcattaaggcaagccaggctgcctcactgtgcttcctcttctgtagaatggaataacacttcatcaggtcattggtggggatcc

SEQ ID NO: 565 - protein, 683 aa, Homo sapiens
MALFVRLLALALALALGPAATLAGPAKSPYQLVLQHSRLRGRQHGPNVCAVQKVIGTNRKYFTNCKQWYQRKICGKSTVISYECCPGYEKVPGEKGCPAALPLSNLYETLGVVGSTTTQLYTDRTEKLRPEMEGPGSFTIFAPSNEAWASLPAEVLDSLVSNVNIELLNALRYHMVGRRVLTDELKHGMTLTSMYQNSNIQIHHYPNGIVTVNCARLLKADHHATNGVVHLIDKVISTITNNIQQIIEIEDTFETLRAAVAASGLNTMLEGNGQYTLLAPTNEAFEKIPSETLNRILGDPEALRDLLNNHILKSAMCAEAIVAGLSVETLEGTTLEVGCSGDMLTINGKAIISNKDILATNGVIHYIDELLIPDSAKTLFELAAESDVSTAIDLFRQAGLGNHLSGSERLTLLAPLNSVFKDGTPPIDAHTRNLLRNHIIKDQLASKYLYHGQTLETLGGKKLRVFVYRNSLCIENSCIAAHDKRGRYGTLFTMDRVLTPPMGTVMDVLKGDNRFSMLVAAIQSAGLTETLNREGVYTVFAPTNEAFRALPPRERSRLLGDAKELANILKYHIGDEILVSGGIGALVRLKSLQGDKLEVSLKNNVVSVNKEPVAEPDIMATNGVVHVITNVLQPPANRPQERGDELADSALEIFKQASAFSRASQRSVRLAPVYQKLLERMKH

SEQ ID NO: 566 - DNA, 2691 bp, Homo sapiens
gcttgcccgtcggtcgctagctcgctcggtgcgcgtcgtcccgctccatggcgctcttcgtgcggctgctggctctcgccctggctctggccctgggccccgccgcgaccctggcgggtcccgccaagtcgccctaccagctggtgctgcagcacagcaggctccggggccgccagcacggccccaacgtgtgtgctgtgcagaaggttattggcactaataggaagtacttcaccaactgcaagcagtggtaccaaaggaaaatctgtggcaaatcaacagtcatcagctacgagtgctgtcctggatatgaaaaggtccctggggagaagggctgtccagcagccctaccactctcaaacctttacgagaccctgggagtcgttggatccaccaccactcagctgtacacggaccgcacggagaagctgaggcctgagatggaggggcccggcagcttcaccatcttcgcccctagcaacgaggcctgggcctccttgccagctgaagtgctggactccctggtcagcaatgtcaacattgagctgctcaatgccctccgctaccatatggtgggcaggcgagtcctgactgatgagctgaaacacggcatgaccctcacctctatgtaccagaattccaacatccagatccaccactatcctaatgggattgtaactgtgaactgtgcccggctcctgaaagccgaccaccatgcaaccaacggggtggtgcacctcatcgataaggtcatctccaccatcaccaacaacatccagcagatcattgagatcgaggacacctttgagacccttcgggctgctgtggctgcatcagggctcaacacgatgcttgaaggtaacggccagtacacgcttttggccccgaccaatgaggccttcgagaagatccctagtgagactttgaaccgtatcctgggcgacccagaagccctgagagacctgctgaacaaccacatcttgaagtcagctatgtgtgctgaagccatcgttgcggggctgtctgtagagaccctggagggcacgacactggaggtgggctgcagcggggacatgctcactatcaacgggaaggcgatcatctccaataaagacatcctagccaccaacggggtgatccactacattgatgagctactcatcccagactcagccaagacactatttgaattggctgcagagtctgatgtgtccacagccattgaccttttcagacaagccggcctcggcaatcatctctctggaagtgagcggttgaccctcctggctcccctgaattctgtattcaaagatggaacccctccaattgatgcccatacaaggaatttgcttcggaaccacataattaaagaccagctggcctctaagtatctgtaccatggacagaccctggaaactctgggcggcaaaaaactgagagtttttgtttatcgtaatagcctctgcattgagaacagctgcatcgcggcccacgacaagagggggaggtacgggaccctgttcacgatggaccgggtgctgacccccccaatggggactgtcatggatgtcctgaagggagacaatcgctttagcatgctggtagctgccatccagtctgcaggactgacggagaccctcaaccgggaaggagtctacacagtctttgctcccacaaatgaagccttccgagccctgccaccaagagaacggagcagactcttgggagatgccaaggaacttgccaacatcctgaaataccacattggtgatgaaatcctggttagcggaggcatcggggccctggtgcggctaaagtctctccaaggtgacaagctggaagtcagcttgaaaaacaatgtggtgagtgtcaacaaggagcctgttgccgagcctgacatcatggccacaaatggcgtggtccatgtcatcaccaatgttctgcagcctccagccaacagacctcaggaaagaggggatgaacttgcagactctgcgcttgagatcttcaaacaagcatcagcgttttccagggcttcccagaggtctgtgcgactagcccctgtctatcaaaagttattagagaggatgaagcattagcttgaagcactacaggaggaatgcaccacggcagctctccgccaatttctctcagatttccacagagactgtttgaatgttttcaaaaccaagtatcacactttaatgtacatgggccgcaccataatgagatgtgagccttgtgcatgtgggggaggagggagagagatgtactttttaaatcatgttccccctaaacatggctgttaacccactgcatgcagaaacttggatgtcactgcctgacattcacttccagagaggacctatcccaaatgtggaattgactgcctatgccaagtccctggaaaaggagcttcagtattgtggggctcataaaacatgaatcaagcaatccagcctcatgggaagtcctggcacagtttttgtaaagcccttgcacagctggagaaatggcatcattataagctatgagttgaaatgttctgtcaaatgtgtctcacatctacacgtggcttggaggcttttatggggccctgtccaggtagaaaagaaatggtatgtagagcttagatttccctattgtgacagagccatggtgtgtttgtaataataaaaccaaagaaacata

SEQ ID NO: 567 - protein, 434 aa, Homo sapiens
MSIEKIWAREILDSRGNPTVEVDLYTAKGLFRAAVPSGASTGIYEALELRDGDKQRYLGKGVLKAVDHINSTIAPALISSGLSVVEQEKLDNLMLELDGTENKSKFGANAILGVSLAVCKAGAAERELPLYRHIAQLAGNSDLILPVPAFNVINGGSHAGNKLAMQEFMILPVGAESFRDAMRLGAEVYHTLKGVIKDKYGKDATNVGDEGGFAPNILENSEALELVKEAIDKAGYTEKIVIGMDVAASEFYRDGKYDLDFKSPTDPSRYITGDQLGALYQDFVRDYPVVSIEDPFDQDDWAAWSKFTANVGIQIVGDDLTVTNPKRIERAVEEKACNCLLLKVNQIGSVTEAIQACKLAQENGWGVMVSHRSGETEDTFIADLVVGLCTGQIKTGAPCRSERLAKYNQLMRIEEELGDEARFAGHNFRNPSVL

SEQ ID NO: 568 - DNA, 10905 bp, Homo sapiens
ctgcaggggaaagttggtggtgtatgcagctggacctaggagagaagcaggagaggaagatccagcacaaaaaatctgaagctaaaaacaggacacagagatgggggaagaaaagagggcagagtgaggcaaaaagagactgaagagatgagggtggccgccaggcactttagataggggagaggctttatttacctctgtttgtttttttttttttttttttttttttttttttgcgaggtagtcttgcttagtctccaggctggagtgcagtggcacaatctcagctcactgcaacttccacctcctgggttcaagcaattctcctgcctcagcctcccgagtagctgggactacaggcgcatgcaaccgcgcctggctaatttttgtatttttagtagaaacggggtttcaccacgttagccaggatggtctggatctcctgacctcgtgatctgcccgcctccgccttccaaagtgctggattacaggggtgagccacagcgcctggtccctatttacttctgtcttctacctccaggagatcaaagacgctggccttcagacctgatcagactcccaggggcagccaccacatgtatgacagagaacagaggatgcctgtttttccccaaagctggaaattcatcacaacctgaggcccaggatctgctctgtgccggtcctctgggcagtgtggggtgcagaatggggtgcctaggcctgagcgttgcctggagcctaggccgggggccgccctcgggcaggcgtgggtgagagccaagaccgcgtgggccgcggggtgctggtaggagtggttggagagacttgcgaaggcggctggggtgttcggatttccaataaagaaacagagtgatgctcctgtgtctgaccgggtttgtgagacattgaggctgtcttgggcttcactggcagtgtgggccttcgtacccgggctacaggggtgcggctctgcctgttactgtcgagtgggtcgggccgtgggtatgagcgcttgtgtgcgctggggccaggtcgtgggtgcccccacccttcccccatcctcctcccttccccactccaccctcgtcggtcccccacccgcgctcgtacgtgcgcctccgccggcagctcctgactcatcgggggctccgggtcacatgcgcccgcgcggccctataggcgcctcctccgcccgccgcccgggagccgcagccgccgccgccactgccactcccgctctctcagcgccgccgtcgccaccgccaccgccaccgccactaccaccgtctgagtctgcagtcccgaggtgaagcccccgccaggcccagagcccctgtggccccctcccttcgccgcggcgcccctgcctcctttacccggtgccgctgcgcacctctccgcatctctggcccggtgcagctgcgcacctgctccgccgcccgcgcccagggcgccttccctccctggccttccccgcccgctgccttcgctttctggccctctgcgcgcctatctctaactgcgcctctccacccttgcctgcctctctcccggtgctcgccctcatctacgtctattgttctaagttggacgtctccggcgtgcattttatcctagagcgtcccttttggtttgcatttgggaaatgtcttctctcaccgttcctcacctcccccagacttcccttgactcccctctctcctgctcttccccacggcgcccctctccgttcgcgcttcctcccctctgctgcacgggggagagatggaagaagtggggatctgtcgaggcgcagaggggaggacaggcccagctcgcctccactccccaccggctcttatcctcttcacttcccgctgcaacccccagggactgcagggcctttctcaggaccctcttccccgacacctgtattgcatgcgcctttcgcgggaagaggagggatacacgtttgggagagagtgggaccttggggaaggggcagtgttcaggcagctggggtgttaagttggggaggtatgggggctctggaagagaggcccaggcagcccatcctcttcttggctcccaggagaaatgcaagcctggcagccattccgctctgaggagatctgggaacccaccggctggccaagctgcaaagaggcgcgggaacatgtcgtgccctccctcctcactgcagtgttctccatctcatcatttgatcttacccgcccgggactgcagtgacctccccttcctcactgcattgaccttctcctcttccaggggggagggggaatcccttctacagccctagactgcagccagcgcctccctacccaccccccacccactgcagtaacctctttcccatccctcccagcctcccgccccgcccattgatctcaggctccacccctctaagcctcttatctttctccttccttcccttccacccgaggagatcccagccatcatgtccatagagaagatctgggcccgggagatcctggactcccgcgggaaccccacagtggaggtggatctctatactgccaaaggtaatgggtgtggcatgggccttcctacagccctagcttttccacggccaggctgggttcggccaggggttcggaggccttttttgatacccaggggtatggggtgctgggccaggctcacaagcctgggttgtggcggttggatcctccttgtccgggagccagggtaggtgggtctgtgttcgagtttagcgtgtgagcatgtcctgcctccgtgtgtctgcctgtgcacttgcatgtgtgcagacgtgtgctgcaagcaattttctttctgcgggctcccacttgtgcatgtggggcctcagatgggtggatgaggaggccacttcttgtgcatctgcctcagtgtgtgtgtggggtgggggtggggggatgttagggagcagtgtggggagagagctagatgtggtaggcaggcagtttagagccagaaggctgaaggactccctggcccctgtgtcctcttcactccctctcattccatgttcctcctttaggtcttttccgggctgcagtgcccagtggagcctctacgggcatctatgaggccctggagctgagggatggagacaaacagcgttacttaggcaaaggtgaggtcccttctcttttccagactctcccccacctcagccttatgcccctacctcacaccagtccccagtcctcctctagcatggcttcccctcctcccattgatcccttccgcccctcctggcccgacccagtccagcctcttcctttccccaggtgtcctgaaggcagtggaccacatcaactccaccatcgcgccagccctcatcagctcagtgaggcctgctctttgctggggatagcagggccagagttctggaaggaatcccggagcagggcaggaggaagggaagaaagaaggcccactcttaggaatcatggttacaagggggaagggtggggaacagcttccttaatgcaccctgctcccatgggagttcaggtcccctaatccaggtaggcccctgtcacagggacctggttggaccctggccaaatgtgagcttgggtgtgaatgaggggaccctctgccttaggctcagcctccagcctggccctgggtgatggagctctgccctcagggtctctctgtggtggagcaagagaaactggacaacctgatgctggagttggatgggactgagaacaaatgtgagccgggccggagaaagtgggaagcgtcagggtggggaggcgtggagcagatagagagctgaagggccagtgctgtagtggcttcctcaggaatgactgtcaggggcattctcctctcaaagccagagcaaggggagatgagtttagctgcagagggaaggaccgacagtaggcagaaggaagaccttctttgcagcatacagaggagggggatggcctgagagagtctgtggtctcagggatatttagaaagaggtgtggctctctgccgtttccaatctcctcctccccacccattcctctccctgctgttttcaagagagcatggatgaggtgttgctggggcaggggtggggagggaggagggggtctcctttactggctccttttggagactacagatggaggcaggagctagaaaggagaaggggacatttggctcagcaccttcctctataatctcctagccaagtttggggccaatgccatcctgggtgtgtctctggccgtgtgtaaggcaggggcagctgagcgggaactgcccctgtatcgccacattgctcagctggccgggaactcagacctcatcctgcctgtgccggtgagcaataagccacggtgcggctctcccaggggcgggtgggggagggagcatgcaactcatgaggaatgatgggaggaaagtgaattgagggaggtaaagaggaaggatggggacgtgagacttagtccggaaagctgggggaagtttgggatcttgggttaacactcctggggcgggcagggaggggctctttgacccttctgtctttctgtggctccccaggccttcaacgtgatcaatggtggctctcatgctggcaacaagctggccatgcaggagttcatgatcctcccagtgggagctgagagctttcgggatgccatgcgactaggtgcagaggtctaccatacactcaagggagtcatcaaggacaaatacggcaaggatgccaccaatgtgggggatgaaggtggctttgcccccaatatcctggagaacagtgaaggtgaggccaggagccccactcccagcgtgctaagtcttaccctattgtgggacatcagaaagggtgacacagttcaccaagtcctgagtaggcgtggagggtcctaggactctgcaaactccaaaaggtaccagttcttagagtggattgcagagagcctgccaaattcacatgcagacctagggggacagtatttttttttttttttgagacggagtcttgctctgtcacccaggctggagtgcagtggctcgatctcagctcactgcaacgtccgcctcccgggttcacgccattctcctgcctcagcctcccgagtagctgggactacaggcgcccgccaccactcccggctaattttttgtattttttagtagagacagggtttcactgtggtctcgaactcctgaccttgtgatcggcccgcctcggcctcccaaagtgctgggattacaagcgtgagccaccacgcctggccaggggacagtcttttacctgcctagccagatgtgttagcatctgttaagttgccactggaaggccgggcgcggtggctcacacctgtaatcccagcactttgggaggctgaggcgggtggatcacctgaggtcaggagtttgagaccagcctggccaacaaggtgaaaccccgtctctactaaaaatacaaaaattagccgggcatggtggcgtgtgcctgtaatcacagatactagcggggctgaggcaggaggatcgcttgtacccgggaggcggaggttgtggtgagccgagatcatgccactgcactccagcctgggcaacagagcgagctccgtctcaaaaaaaaaaaaaaaaaaaaaagttgtcactggagcccttgggaatactgggagatggtctggatgacctgttggattcatcccatcccattcgaaatctgtcctgtccccgtcccaacctcctaggcctctagaatccctaatttttctgtgccttgggggaaactgtatagggaatggaaagaatataggtagtggttaagagttaaggttctggggccaaataacctggatttatttgaaccttgacttgtggagttactgctggtgaactttcttacttctctctggaaataataacagaatctagctcatggtagtgtgaggcttaaatgaaatatatataaaatgcttagatgacatgataccaatgaaagtatagtaagtattattaagagaattccattcctctgtgttcctagaagatggcctctcctccagacctgggataaccccaacagcatccccgccacacttccctcaggaacagacctccacctctgccctgaatgtcttttctttccctcctcctccttgcccatccctcctgcttgtactataatctcactgtattctgtccccagccttggagctggtgaaggaagccatcgacaaggctggctacacggaaaagatcgttattggcatggatgttgctgcctcagagttttatcgtgatggcaaatatgacttggacttcaagtctcccactgatccttcccgatacatcactggggaccagctgggggcactctaccaggactttgtcagggactatcctggtgagaggaagtggtgtgagggggaggtctgggggcaggcagggacgtgtcccagcaactctggaccttatggggtgctgactcaggcaccaggtgggggtgtcctaagaagaacctgagaaccagggagagggtgcaggagccacctgcaaagactgggctttgtatgtagtgtaaaaaatgcaggtacccgtgaccaatctgttctgtctcagatcctgattaaagtcatgggttctgaaaactactggggtcatggggaaggctctggaaggaaccagggatgatatgagtgtgactggatctagcagagaactagaacatttcagtatctttgattgatgaaattgtggatgctgaatggagctgggactgatgtgtgagtagaaagaaggctgagggggactgaattagcttctgcaagtctgcccagggcctttatctcaggatggaggcagttggtcgccatcttcctgacacagagcgaaagaaaatcaacataattgcagaattaaggatttggattagcaatgaggaagggcttgctggcagtgagaacaggaaaatgcaaagctaggttgtgaacccttgttactggaagattttttttggggggggggtggggttgttttttttgttttgttttttttttttgagacagagtttgactcttcttgcccaggctggagtgcaatggcgccatctcggctcaccacaacctccactcccggattcaagcgattcttctgcctcagcctcccgaatagctgggattacagcatgtgccaccatgcctggctaattttgtatttttagtagagacaggggtttctccatgttggtcaggctggtctccaactcctgacctcaggtaatctatccaccttggtctcccaaagtgctgggattacagcgtgagccaccacgcctggctggtttgcttttaattaactttttttttttttttttttttttgtagagacagggtttaccatgttgctcatggctggtctcaaactactgggctcaagtgatctgcatgcctcggcctcccaaagtgctgggattacaggcatgagccactgtgcccagcctatggaagtggcgtgagatctctgctcactgcacgattctcttagcctcccaagtagctgggattacaggcgtgcaccaccatgcctgctaatttttgtatttttagtagagatggggttttactatgttagccagggaactcctatcctcaagtgatccgttcacctcagtatcccaaagtgctgggattacaggcatgagccactgtgcctggcctctccatgtaaggttttatgaaataagaatcaggagccaggcgtggtgctcatgcctgtaatcccattactttgggaagccgaggcaggaggactgcttgaatccaggagttcgagactggcctggcaatacagtgagacctcatctctacaaaaattttaaaaattagctgagtgtggtgccacacacctaaagtccctgctactcaggaggctgaggtggcaggatcacttgattggggaggtggaggttgcagtgagctgagattgtgccactgcactccagcctggatgacagaatgaggctctgtcaaaaaaaaaaaaaaagttaagaatcagttagggcaggcttacactggggggatttgtcttagcaaggatgagcaggtgtagttaaccaagggcctgtccatttcagggaataaaggggcatgttcctgcctgatgtagagacccagggaagatgaacacctcccccctccccaccatgctctctctgcagtggtctccattgaggacccatttgaccaggatgattgggctgcctggtccaagttcacagccaatgtagggatccagattgtgggtgatgacctgacagtgaccaacccaaaacgtattgagcgggcagtggaagaaaaggcctgcaactgtctgctgctcaaggtcaaccagatcggctcggtcactgaagccatccaagcgtgagtgacttctggccctctcctgtgtggtcctcgtttctataagactccttttgcaagtgctccagcctaattctacccaggggtgccaaagagagcggggaacctggaatcatcctcacagttctctcacctctgcccctccacccctgattctctgctcccctcccagatagctttcccctagatgtttcctgacatagaccaaggttggggctgggaagagagtgcccagtgtgagagctggagaatcagtgctgtgtgtggatacaggtgcaagctggcccaggagaatggctggggggtcatggtgagtcatcgctcaggagagactgaggacacattcattgctgacctggtggtggggctgtgcacaggccaggtgagtgaggcagcctggtgagtgaagagaactctctgtgggattggtatttctagctcacccacctggtctctccttccaggtgtttgagggtgtcaggggagtttcaggagagcagaagtttcctttcaggggtgagagggcagtcactgagctgcaaatcctttgaaatgtttcagatcaagactggtgccccgtgccgttctgaacgtctggctaaatacaaccagctcatgaggtgagggtccctggggtgggagcccctggcccagatggctaaaggccccatttgcctgccagaccatctgtagcaccaagggcctggataacagtccatttcctggataacagtccaacagataatattggtttttgcttcctgggtttattgatggcctgattgacaaatcccagagatcacatgggaaagccagggaatgctaagccttggggcaggacacaaaagcaggtggtgtgggggtggttggagtctgggggacccctagagagagaagcaggatcctcctgcatccctgaccacttcctttgtggttcatctctctcagaattgaggaagagctgggggatgaagctcgctttgccggacataacttccgtaatcccagtgtgctgtgattcctctgcttgcctggagacgtggaacctctgtctcatcctcctggaaccttgctgtcctgatctgtgatagttcaccccctgagatcccctgagccccagggtgcccagaacttccctgattgacctgctccgctgctccttggcttacctgacctcttgctgtctctgctcgccctcctttctgtgccctactcattggggttccgcactttccacttcttcctttctctttctctcttccctcagaaactagaaatgtgaatgaggattattataaaagggggtccgtggaagaatgatcagcatctgtgatgggagcgtcagggttggtgtgctgaggtgttagagagggaccatgtgtcacttgtgctttgctcttgtcccacgtgtcttccactttgcatatgagccgtgaactgtgcatagtgctgggatggaggggagtgttgggcatgtgatcacgcctggctaataaggctttagtgtatttatttatttatttattttatttgtttttcattcatcccattaatcatttccccataactcaatggcctaaaactggcctgacttgggggaacgatgtgtctgtatttcatgtggctgtagatcccaagatgactggggtgggaggtcttgctagaatgggaagggtcatagaaagggccttgacatcagttcctttgtgtgtactcactgaagcctgcgttggtccagagcggaggctgtgtgcctgggggagttttcctctatacatctctccccaaccctaggttccctgttcttcctccagctgcaccagagcaacctctcactccccatgccacgttccacagttgccaccacctctgtggcattgaaatgagcacctccattaaagtctgaatcagtgcactgttgtgtctaaggagtcttactctagtccctatgaggggagagaagatggagcacctggaagctggtgaaactggatagcagagctgggggggcacaaaaagaggaagacaaactgaacaaatatggccgagatgatggcactgcctaccccattctggctaggtggggtgcatgtggcccctgctttcttagcagaaggcttggctcccagacgcaggtgaattaaggggttcaagagcccctaaaagcataaaatattttgtgtgtgtgtgtgtgtgcacgcgcattttgggggaaagggggtctaaggtgttttcatatccaaagggcttgtggactggagcagctcctgtactgggcctctgccaacaaaaccctggctggttctcgaatggaacaggacttcatggccatcacccactgcaagatggggaaatgggaaggaagaatggttccgggggtagtatacggaaggacctaaggaaacagagtcctcaataaactgaagattcaggaacaaaagtgcttaacagaaccctggctgggtcagactaacagtaggtttccaatatgtggctagagacgtac

SEQ ID NO: 569 - protein, 4590 aa, Homo sapiens
MGRHLALLLLLLLLFQHFGDSDGSQRLEQTPLQFTHLEYNVTVQENSAAKTYVGHPVKMGVYITHPAWEVRYKIVSGDSENLFKAEEYILGDFCFLRIRTKGGNTAILNREVKDHYTLIVKALEKNTNVEARTKVRVQVLDTNDLRPLFSPTSYSVSLPENTAIRTSIARVSATDADIGTNGEFYYSFKDRTDMFAIHPTSGVIVLTGRLDYLETKLYEMEILAADRGMKLYGSSGISSMAKLTVHIEQANECAPVITAVTLSPSELDRDPAYAIVTVDDCDQGANGDIASLSIVAGDLLQQFRTVRSFPGSKEYKVKAIGDIDWDSHPFGYNLTLQAKDKGTPPQFSSVKVIHVTSPQFKAGPVKFEKDVYRAEISEFAPPNTPVVMVKAIPAYSHLRYVFKRTPGKAKFSLNYNTGLISILEPVKRQQAAHFELEVTTSDRKASTKVLVKVLGANSNPPEFTQTAYKAAFDENVPIGTTIMSLSAVDPDEGENGYVTYSIANLNHVPFAIDHFTGAVSTSENLDYELMPRVYTLRIRASDWGLPYRREVEVLATITLNNLNDNTPLFEKINCEGTIPRDLGVGEQITTVSAIDADELQLVQYQIEAGNELDLFSLNPNSGVLSLKRSLMDGLGAKVSFHSLRITATDGENFATPLYINITVAASHKLVNLQCEETGVAKMLAEKLLQANKLHNQGEVEDIFFDSHSVNAHIPQFRSTLPTGIQVKENQPVGSSVIFMNSTDLDTGFNGKLVYAVSGGNEDSCFMIDMETGMLKILSPLDRETTDKYTLNITVYDLGIPQKAAWRLLHVVVVDANDNPPEFLQESYFVEVSEDKEVHSEIIQVEATDKDLGPNGHVTYSILTDTDTFSIDSVTGVVNIARPLDRELQHEHSLKIEARDQAREEPQLFSTVVVKVSLEDVNDNPPTFIPPNYRVKVREDLPEGTVIMWLEAHDPDLGQSGQVRYSLLDHGEGNFDVDKLSGAVRIVQQLDFEKKQVYNLTVRAKDKGKPVSLSSTCYVEVEVVDVNENLHPPVFSSFVEKGTVKEDAPVGSLVMTVSAHDEDAGRDGEIRYSIRDGSGVGVFKIGEETGVIETSDRLDRESTSHYWLTVFATDQGVVPLSSFIEIYIEVEDVNDNAPQTSEPVYYPEIMENSPKDVSVVQIEAFDPDSSSNDKLMYKITSGNPQGFFSIHPKTGLITTTSRKLDREQQDEHILEVTVTDNGSPPKSTIARVIVKILDENDNKPQFLQKFYKIRLPEREKPDRERNARREPLYRVIATDKDEGPNAEISYSIEDGNEHGKFFIEPKTGVVSSKRFSAAGEYDILSIKAVDNGRPQKSSTTRLHIEWISKPKQSLEPISFEESFFTFTVMESDPVAHMIGVISVEPPGIPLWFDITGGNYDSHFDVDKGTGTIIVAKPLDAEQKSNYNLTVEATDGTTTILTQVFIKVIDTNDHRPQFSTSKYEVVIPEDTAPETEILQISAVDQDEKNKLIYTLQSSRDPLSLKKFRLDPATGSLYTSEKLDHEAVSPAHLTVMVRDQDVPVKRNFARIVVNVSDTNDHAPWFTASSYKGRVYESAAVGSVVLQVTALDKDKGKNAEVLYSIESGNIGNIGNSFMIDPVLGSIKTAKELDRSNQAEYDLMVKATDKGSPPMSEITSVRIFVTIADNASPKFTSKEYSVELSETVSIGSFVGMVTAHSQSSVVYEIKDGNTGDAFDINPHSGTIITQKALDFETLPIYTLIIQGTNMAGLSTNTTVLVHLQDENDNAPVFMQAEYTGLISESASINSVVLTDRNVPLVIRAADADKDSNALLVYHIVEPSVHTYFAIDSSTGAIHTVLSLDYEETSIFHFTVQVHDMGTPRLFAEYAANVTVHVIDINDCPPVFAKPLYEASLLLPTYKGVKVITVNATDADSSAFSQLIYSITEGNIGEKFSMDYKTGALTVQNTTQLRSRYELTVRASDGRFAGLTSVKINVKESKESHLKFTQDVYSAVVKENSTEAETLAVITAIGSPINEPLFYHILNPDRRFKISRTSGVLSTTGTPFDREQQEAFDVVVEVIEEHKPSAVAHVVVKVIVEDQNDNAPVFVNLPYYAVVKVDTEVGHVIRYVTAVDRDSGRNGEVHYYLKEHHEHFQIGPLGEISLKKQFELDTLNKEYLVTVVAKDGGNPAFSAEVIVPITVMNKAMPVFEKPFYSAEIAESIQVHSPVVHVQANSPEGLKVFYSITDGDPFSQFTINFNTGVINVIAPLDFEAHPAYKLSIRATDSLTGAHAEVFVDIIVDDINDNPPVFAQQSYAVTLSEASVIGTSVVQVRATDSDSEPNRGISYQMFGNHSKSHDHFHVDSSTGLISLLRTLDYEQSRQHTIFVRAVDGGMPTLSSDVIVTVDVTDLNGNPPLFEQQIYEARISEHAPHGHFVTCVKAYDADSSDIDKLQYSILSGNDHKHFVIDSATGIITLSNLHRHALKPFYSLNLSVSDGVFRSSTQVHVTVIGGNLHSPAFLQNEYEVELAENAPLHTLVMEVKTTDGDSGIYGHVTYHIVNDFAKDRFYINERGQIFTLEKLDRETPAEKVISVRLMAKDAGGKVAFCTVNVILTDDNDNAPQFRATKYEVNIGSSAAKGTSVVKSASDADEGSNADITYAIEADSESVKENLEINKLSGVITTKESLIGLENEFFTFFVRAVDNGSPSKESVVLVYVKILPPEMQLPKFSEPFYTFTVSEDVPVGTEIDLIRAEHSGTVLYSLVKGNTPESNRDESFVIDRQSGRLKLEKSLDHETTKWYQFSILARCTQDDHEMVASVDVSIQVKDANDNSPVFESSPYEAFIVENLPGGSRVIQIRASDADSGTNGQVMYSLDQSQSVEVIESFAINMETGWITTLKELDHEKRDNYQIKVVASDHGEKIQLSSTAIVDVTVTDVNDSPPRFTAEIYKGTVSEDDPQGGVIAILSTTDADSEEINRQVTYFITGGDPLGQFAVETIQNEWKVYVKKPLDREKRDNYLLTITATDGTFSSKAIVEVKVLDANDNSPVCEKTLYSDTIPEDVLPGKLIMQISATDADIRSNAEITYTLLGSGAEKFKLNPDTGELKTSTPLDREEQAVYHLLVRATDGGGRFCQASIVVTLEDVNDNAPEFSADPYAITVFENTEPGTLLTRVQATDADAGLNRKILYSLIDSADGQFSINELSGIIQLEKPLDRELQAVYTLSLKAVDQGLPRRLTATGTVIVSVLDINDNPPVFEYREYGATVSEDILVGTEVLQVYAASRDIEANAEITYSIISGNEHGKFSIDSKTGAVFIIENLDYESSHEYYLTVEATDGGTPSLSDVATVNVNVTDINDNTPVFSQDTYTTVISEDAVLEQSVITVMADDADGPSNSHIHYSIIDGNQGSSFTIDPVRGEVKVTKLLDRETISGYTLTVQASDNGSPPRVNTTTVNIDVSDVNDNAPVFSRGNYSVIIQENKPVGFSVLQLVVTDEDSSHNGPPFFFTIVTGNDEKAFEVNPQGVLLTSSAIKRKEKDHYLLQVKVADNGKPQLSSLTYIDIRVIEESIYPPAILPLEIFITSSGEEYSGGVIGKIHATDQDVYDTLTYSLDPQMDNLFSVSSTGGKLIAHKKLDIGQYLLNVSVTDGKFTTVADITVHIRQVTQEMLNHTIAIRFANLTPEEFVGDYWRNFQRALRNILGVRRNDIQIVSLQSSEPHPHLDVLLFVEKPGSAQISTKQLLHKINSSVTDIEEIIGVRILNVFQKLCAGLDCPWKFCDEKVSVDESVMSTHSTARLSFVTPRHHRAAVCLCKEGRCPPVHHGCEDDPCPEGSECVSDPWEEKHTCVCPSGRFGQCPGSSSMTLTGNSYVKYRLTENENKLEMKLTMRLRTYSTHAVVMYARGTDYSILEIHHGRLQYKFDCGSGPGIVSVQSIQVNDGQWHAVALEVNGNYARLVLDQVHTASGTAPGTLKTLNLDNYVFFGGHIRQQGTRHGRSPQVGNGFRGCMDSIYLNGQELPLNSKPRSYAHIEESVDVSPGCFLTATEDCASNPCQNGGVCNPSPAGGYYCKCSALYIGTHCEISVNPCSSNPCLYGGTCVVDNGGFVCQCRGLYTGQRCQLSPYCKDEPCKNGGTCFDSLDGAVCQCDSGFRGERCQSDIDECSGNPCLHGALCENTHGSYHCNCSHEYRGRHCEDAAPNQYVSTPWNIGLAEGIGIVVFVAGIFLLVVVFVLCRKMISRKKKHQAEPKDKHLGPATAFLQRPYFDSKLNKNIYSDIPPQVPVRPISYTPSIPSDSRNNLDRNSFEGSAIPEHPEFSTFNPESVHGHRKAVAVCSVAPNLPPPPPSNSPSDSDSIQKPSWDFDYDTKVVDLDPCLSKKPLEEKPSQPYSARESLSEVQSLSSFQSESCDDNGYHWDTSDWMPSVPLPDIQEFPNYEVIDEQTPLYSADPNAIDTDYYPGGYDIESDFPPPPEDFPAADELPPLPPEFSNQFESIHPPRDMPAAGSLGSSSRNRQRFNLNQYLPNFYPLDMSEPQTKGTGENSTCREPHAPYPPGYQRHFEAPAVESMPMSVYASTASCSDVSACCEVESEVMMSDYESGDDGHFEEVTIPPLDSQQHTEV

SEQ ID NO: 570 - DNA, 14756 bp, Homo sapiens
ctgggcggccgggcgcggggagagggcgcgggagcggctcgtgcggcaggtaccatgcggacgcgcgagcccggcgaggccccggcaggcccgtccctgctcgggggcgcgctgagacggcgggtgagctccacgagagcgccgtcgccacttcgggccaactttgcgattcccgacagttaagcaatggggagacatttggctttgctcctgcttctgctccttctcttccaacattttggagacagtgatggcagccaacgacttgaacagactcctctgcagtttacacacctcgagtacaacgtcaccgtgcaggagaactctgcagctaagacttatgtggggcatcctgtcaagatgggtgtttacattacacatccagcgtgggaagtaaggtacaaaattgtttccggagacagtgaaaacctgttcaaagctgaagagtacattctcggagacttttgctttctaagaataaggaccaaaggaggaaatacagctattcttaatagagaagtgaaggatcactacacattgatagtgaaagcacttgaaaaaaatactaatgtggaggcgcgaacaaaggtcagggtgcaggtgctggatacaaatgacttgagaccgttattctcacccacctcatacagcgtttctttacctgaaaacacagctataaggaccagtatcgcaagagtcagcgccacggatgcagacataggaaccaacggggaattttactacagttttaaagatcgaacagatatgtttgctattcacccaaccagtggtgtgatagtgttaactggtagacttgattacctagagaccaagctctatgagatggaaatcctcgctgcggaccgtggcatgaagttgtatgggagcagtggcatcagcagcatggccaagctaacggtgcacatcgaacaggccaatgaatgtgctccggtgataacagcagtgacattgtcaccatcagaactggacagggacccagcatatgcaattgtgacagtggatgactgcgatcagggtgccaatggtgacatagcatctttaagcatcgtggcaggtgaccttctccagcagtttagaacagtgaggtcctttccagggagtaaggagtataaagtcaaagccatcggtgacattgattgggacagtcatcctttcggctacaatctcacactacaggctaaagataaaggaactccgccccagttctcttctgttaaagtcattcacgtgacttctccacagttcaaagccgggccagtcaagtttgaaaaggatgtttacagagcagaaataagtgaatttgctcctcccaacacacctgtggtcatggtaaaggccattcctgcttattcccatttgaggtatgtttttaaaaggacacctggaaaagctaaattcagtttaaattacaacactggtctcatttctattttagaaccagttaaaagacagcaggcagcccattttgaacttgaagtaacaacaagtgacagaaaagcgtccaccaaggtcttggtgaaagtcttaggtgcaaatagcaatccccctgaatttacccagacagcgtacaaagctgcttttgatgagaacgtgcccattggtactactatcatgagcctgagtgccgtagaccctgatgagggtgagaatgggtacgtgacatacagtatcgcaaatttaaatcatgtgccgtttgcgattgaccatttcactggtgccgtgagtacgtcagaaaacctggactacgaactgatgcctcgggtttatactctgaggattcgtgcatcagactggggcttgccgtaccgccgggaagtcgaagtccttgctacaattactctcaataacttgaatgacaacacacctttgtttgagaaaataaattgtgaagggacaattcccagagatctaggcgtgggagagcaaataaccactgtttctgctattgatgcagatgaacttcagttggtacagtatcagattgaagctggaaatgaactggatttgtttagtttaaaccccaactcgggggtattgtcattaaagcgatcgctaatggatggcttaggtgcaaaggtgtctttccacagtctgagaatcacagctacagatggagaaaattttgccacaccattatatatcaacataacagtggctgccagtcacaagctggtaaacttgcagtgtgaagagactggtgttgccaaaatgctggcagagaagctcctgcaggcaaataaattacacaaccagggagaggtggaggatattttcttcgattctcactctgtcaatgctcacataccgcagtttagaagcactcttccgactggtattcaggtaaaggaaaaccagcctgtgggttccagtgtaattttcatgaactccactgaccttgacactggcttcaatggaaaactggtctatgctgtttctggaggaaatgaggatagttgcttcatgattgatatggaaacaggaatgctgaaaattttatctcctcttgaccgtgaaacaacagacaaatacaccctgaatattaccgtctatgaccttgggataccccagaaggctgcgtggcgtcttctacatgtcgtggttgtcgatgccaatgataatccacccgagtttttacaggagagctattttgtggaagtgagtgaagacaaggaggtacatagtgaaatcatccaggttgaagccacagataaagacctggggcccaacggacacgtgacgtactcaattcttacagacacagacacattttcaattgacagcgtgacgggtgttgttaacatcgcacgccctctggatcgagagctgcagcatgagcactccttaaagattgaggccagggaccaagccagagaagagcctcagctgttctccactgtcgttgtgaaagtatcactagaagatgttaatgacaacccacctacatttattccacctaattatcgtgtgaaagtccgagaggatcttccagaaggaaccgtcatcatgtggttagaagcccacgatcctgatttaggtcagtctggtcaggtgagatacagccttctggaccacggagaaggaaacttcgatgtggataaactcagtggagcagttaggatcgtccagcagttggactttgagaagaagcaagtgtataatctcactgtgagggccaaagacaagggaaagccagtttctctgtcttctacttgctatgttgaagttgaggtggttgatgtgaatgagaacctgcacccacccgtgttttccagctttgtggaaaaggggacagtgaaagaagatgcacctgttggttcattggtaatgacggtgtcggctcatgatgaggacgccggaagagatggggagatccgatactccattagagatggctctggcgttggtgttttcaaaataggtgaagagacaggtgtcatagagacgtcagatcgactggaccgtgaatcgacctcccattattggctaacagtctttgcaaccgatcagggtgtcgtgcctctttcatcgttcatagagatctacatagaggttgaggatgtcaatgacaatgcaccacagacatcagagcctgtttattacccagaaatcatggaaaattctcctaaagatgtatctgtggtccagatcgaggcatttgatccagattcgagctctaatgacaagctcatgtacaaaattacaagtggaaatccacaaggattcttttcaatacatcctaaaacaggtctcatcacaactacgtcaaggaagctagaccgagaacagcaagatgaacacatattagaggttactgtgacagacaatggtagtccccccaaatcaaccattgcaagagtcattgtgaaaatccttgatgaaaatgacaacaaacctcagtttctgcaaaagttctacaaaatcagactccctgagcgggaaaagccagaccgagaaagaaatgccagacgggagccgctctatcgcgtcatagccaccgacaaggatgagggccccaatgcagaaatctcctacagcatcgaagacgggaatgagcatggcaaatttttcatcgaaccgaaaactggagtggtttcgtccaagaggttttcagcagctggagaatatgatattctttcaattaaggcagttgacaatggtcgccctcaaaagtcatcaaccaccagactccatattgaatggatctccaagcccaaacagtccctggagcccatttcatttgaagaatcattttttacctttactgtgatggaaagtgaccccgttgctcacatgattggagtaatatctgtggagcctcctggcatacccctttggtttgacatcactggtggcaactacgacagtcacttcgatgtggacaagggaactggaaccatcattgttgccaaacctcttgatgcagaacagaagtcaaactacaacctcacagtcgaggctacagatggaaccaccactatcctcactcaggtattcatcaaagtaatagacacaaatgaccatcgtcctcagttttctacatcaaagtatgaagttgttattcctgaagatacagcgccagaaacagaaattttgcaaatcagtgctgtggatcaggatgagaaaaacaaactaatctacactctgcagagcagtagagatccactgagtctcaagaaatttcgtcttgatcctgcaaccggctctctctatacttctgagaaactggatcatgaagctgtttcaccagcacacctcacggtcatggtacgagatcaagatgtgcctgtaaaacgcaactttgcaaggattgtggtcaatgtcagcgacacgaatgaccacgccccgtggttcaccgcttcctcctacaaagggcgggtttatgaatcggcagccgttggctcagttgtgttgcaggtgacggctctggacaaggacaaagggaaaaatgctgaagtgctgtactcgatcgagtcaggaaatattggaaatattggaaattcttttatgattgatcctgtcttgggctctattaaaactgccaaagaattagatcgaagtaaccaagcggagtatgatttaatggtaaaagctacagataagggcagtccaccaatgagtgaaataacttctgtgcgtatctttgtcacaattgctgacaacgcctctccgaagtttacatcaaaagaatattctgttgaacttagtgaaactgtcagcattgggagtttcgttgggatggttacagcccatagtcaatcatcagtggtgtatgaaataaaagatggaaatacaggtgatgcttttgatattaatccacattctggaactatcatcactcagaaagccctggactttgaaactttgcccatttacacattgataatacaaggaactaacatggctggtttgtccactaatacaacggttctagttcacttgcaggatgagaatgacaacgcgccagtttttatgcaggcagaatatacaggactcattagtgaatcagcctcaattaacagcgtggtcctaacagacaggaatgtcccactggtgattcgagcagctgatgctgataaagactcaaatgctttgcttgtatatcacattgttgaaccatctgtacacacatattttgctattgattctagcactggtgctattcatacagtactaagtctggactatgaagaaacaagtatttttcactttaccgtccaagtgcatgacatgggaaccccacgtttatttgctgagtatgcagcgaatgtaacagtacatgtaattgacattaatgactgcccccctgtgtttgccaagccattatatgaagcatctcttttgttaccaacatacaaaggagtaaaagtcatcacagtaaatgctacagatgctgattcaagtgcattctcacagttgatttactccatcaccgaaggcaacatcggggagaagttttctatggactacaagactggtgctctcactgtccaaaacacaactcagttaagaagccgctacgagctaaccgttagagcttccgatggcagatttgccggccttacctctgtcaaaattaatgtgaaagaaagcaaagaaagtcacctaaagtttacccaggatgtctactctgcggtagtgaaagagaattccaccgaggccgaaacattagctgtcattactgctattgggagtccaatcaatgagcctttgttttatcacatcctcaacccagatcgcagatttaaaataagccgcacttcaggggttctgtcaaccactggcacgcccttcgatcgtgagcagcaggaggcgtttgatgtggttgtagaagtgatagaggaacataagccttctgcagtggcccacgttgtcgtgaaggtcattgtagaagaccaaaatgataatgcgccggtgtttgtcaaccttccctactacgccgttgttaaagtggacactgaggtgggccatgtcattcgctatgtcactgctgtagacagagacagtggcagaaacggggaagtgcattactacctcaaggaacatcatgaacactttcaaattggacccttgggtgaaatttcactgaaaaagcaatttgagcttgacaccttaaataaagaatatcttgttacagtggttgcaaaagatggagggaacccggccttttcagcggaagttatcgttccgatcactgtcatgaataaagccatgcctgtgtttgaaaaacctttctacagtgcagagattgcagagagcatccaggtgcacagccctgtggtccacgtgcaggctaacagcccggaaggcctgaaagtgttctacagcatcacagacggagaccctttcagccagttcactattaacttcaatactggagttatcaatgtcatagctcctctggactttgaggcccacccggcatataagctgagcatacgcgcaactgactccttgacgggcgctcatgctgaagtatttgtggacatcatagtagacgacatcaatgataaccctcctgtgtttgctcagcagtcttatgcggtgaccctgtctgaggcatctgtaattggaacgtctgttgttcaagttagagccaccgattctgattcagaaccaaatagaggaatctcataccagatgtttgggaatcacagcaagagtcatgatcattttcatgtagacagcagcactggcctcatctcactactcagaaccctggattacgagcagtcccggcagcacacgatttttgtgagggcagttgatggtggtatgcccacgctgagcagtgatgtgattgtcacggtggacgttaccgacctcaatggtaatccaccactctttgaacaacagatttatgaagccagaattagcgagcacgcccctcatgggcatttcgtgacctgtgtaaaagcctatgatgcagacagttcagacatagacaagttgcagtattccattctgtctggcaatgatcataaacattttgtcattgacagtgcaacagggattatcaccctctcaaacctgcaccggcacgccctgaagccattttacagtcttaacctgtcagtgtctgatggagtttttagaagttccacccaggttcatgtaactgtaattggaggcaatttgcacagtcctgctttccttcagaacgaatatgaagtggaactagctgaaaacgctcccctacataccctggtgatggaggtgaaaactacggatggggattctggtatttatggtcacgttacttaccatattgtaaatgactttgccaaagacagattttacataaatgagagaggacagatatttactttggaaaaacttgatcgagaaaccccggcggagaaagtgatctcagtccgtttaatggctaaggatgctggaggaaaagttgctttctgcaccgtgaatgtcatccttacagatgacaatgacaatgcaccacaatttcgagcaaccaaatacgaagtgaatatcgggtccagtgctgctaaagggacttcagtcgtaaagtctgcaagtgatgccgatgagggctccaatgccgacatcacctatgccattgaagcagactctgaaagtgtaaaagagaatttggaaattaacaaactgtccggcgtaatcactacaaaggagagcctcattggcttggaaaatgaattcttcactttctttgttagagctgtggataatgggtctccatcaaaagaatctgttgttcttgtctatgttaaaatccttccaccggaaatgcagcttccaaaattttcagaacctttctatacctttacagtgtcagaggacgtgcctgttggaacagagatagatctcatccgagcagaacatagtgggactgttctttacagcctggtcaaagggaatactccagaaagcaatagggatgagtcctttgtgattgacagacagagcgggagactgaagttggagaagagtcttgatcatgagacaactaagtggtatcagttttccatactggccaggtgcactcaagatgaccatgagatggtggcttctgtagatgttagtatccaagtgaaagatgcaaatgacaacagcccggtctttgaatctagtccatatgaggcattcattgttgaaaacctgccagggggaagtagagtaattcagatcagggcatctgatgctgactcaggaaccaacggccaagttatgtatagcctggatcagtcacaaagtgtggaagtcattgaatcctttgccattaacatggaaacaggctggattacaactttaaaggaacttgaccatgaaaagagagacaattaccagattaaagtggttgcatcagatcatggtgaaaagatccagctatcctccacagccattgtggatgttaccgtcaccgatgtcaacgatagtccaccacgattcacggccgagatctataaagggactgtgagtgaggatgacccccaaggtggggtgattgccatcttaagtaccacggatgctgattctgaagagatcaacagacaagttacatatttcataacaggaggggatcctttaggacagtttgccgttgaaactatacagaatgaatggaaggtatatgtgaagaaacctctagacagggaaaaaagggacaattaccttcttactatcacggcaactgatggcaccttctcatcaaaagcgatagttgaagtgaaagttctggatgcaaatgacaacagtccagtttgtgaaaagactttatattcagacactattcctgaagacgtccttcctggaaaattgatcatgcagatctctgctacagacgcagacatccgctctaacgctgaaattacttacacgttattgggttcaggtgcagaaaaattcaaactaaatccagacacaggtgaactgaaaacgtcaaccccccttgatcgtgaggagcaagctgtttatcatcttctcgtcagggccacagatggaggaggaagattctgccaagccagtattgtcgtcacgctagaagatgtgaacgataacgcccccgaattctctgccgatccttatgccatcaccgtgtttgaaaacacagagccgggaacgctgctgacaagagtgcaggccacagatgccgacgcaggattaaatcggaagattttatactcactgattgactctgctgatgggcagttctccattaacgaattatctggaattattcagttagaaaaacctttggacagagaactccaggcagtatacaccctctctttgaaagctgtggatcaaggcttgccaaggaggctgactgccactggcactgtgattgtatcagttcttgacataaatgacaacccccctgtgtttgagtaccgtgaatatggtgccaccgtgtctgaggacattcttgttggaactgaagttcttcaagtgtatgcagcaagtcgggatattgaagcaaatgcagaaatcacctactcaataataagtggaaatgaacatgggaaattcagcatagattctaaaacaggggccgtatttatcattgagaatctggattatgagagctctcatgagtattacctaacagtagaggccactgatggaggcacgccttcactgagcgacgttgccactgtgaacgttaatgtaacagatatcaacgataatacccctgtgttcagccaagacacctacacgacagtcatcagtgaagatgccgttcttgagcagtctgtcatcacggttatggccgatgatgccgatggaccttccaacagccacatccactactcaattatagatggcaaccaaggaagctcgttcacaattgaccccgtcaggggagaagtcaaagtgaccaaacttctcgaccgagaaacgatttcaggttacacgctcacggttcaagcttctgataatggcagtccacccagagtcaacacgacgaccgtgaacatcgatgtgtccgatgtcaatgacaacgcgcccgtcttctccaggggaaactacagtgtcattatccaggaaaataagccagtgggcttcagcgtgctgcagctggtagtaacagatgaggattcttcccataacggtccacccttcttctttactattgtaactggaaatgatgagaaggcttttgaagttaacccgcaaggagtcctcctgacatcatctgccatcaagaggaaggagaaagatcattacttactgcaggtgaaggtggcagataatggaaagcctcagttgtcatctttgacatacattgacattagggtaattgaggagagcatctatccgcctgcgattttgcccctggagattttcatcacctcttctggagaagaatactcaggtggcgtcattgggaagatccatgccacagaccaggacgtgtatgatactctaacctacagtctcgaccctcagatggacaacctgttctctgtttccagcacagggggcaagctgatagcacacaaaaagctagacatagggcaataccttctcaatgtcagcgtaacagatgggaagttcacgacggtggccgacatcacagtgcatatcagacaagtcacacaggagatgttgaaccacaccatcgcgatccgctttgccaacctcactccggaagaattcgttggtgactactggcgcaacttccagcgagctttacggaacatcctgggtgtgaggaggaacgacatacagattgttagtttgcagtcctctgaacctcacccacatctggacgtcttactttttgtagagaaaccaggtagtgctcagatctcaacaaaacaacttctgcacaagattaactcttccgtgactgacattgaggaaatcattggagttaggatactgaatgtattccagaaactctgcgcgggactggactgcccctggaagttctgcgatgaaaaggtgtctgtggatgaaagtgtgatgtcaacacacagcacagccagactgagttttgtgactccccgccaccacagggcagcggtgtgtctctgcaaagagggaaggtgcccacctgtccaccatggctgtgaagatgatccgtgccctgagggatccgaatgtgtgtctgatccctgggaggagaaacacacctgtgtctgtcccagcggcaggtttggtcagtgcccagggagttcatctatgacactgactggaaacagctacgtgaaataccgtctgacggaaaatgaaaacaaattagagatgaaactgaccatgaggctcagaacatattccacgcatgcggttgtcatgtatgctcgaggaactgactatagcatcttggagattcatcatggaaggctgcagtacaagtttgactgtggaagtggccctggaattgtctctgttcagagcattcaggtcaatgatgggcagtggcacgcagtggccctggaagtgaatggaaactatgctcgcttggttctagaccaagttcatactgcatcgggcacagccccagggactctgaaaaccctgaacctggataactatgtgttttttggtggccacatccgtcagcagggaacaaggcatggaagaagtcctcaagttggtaatggtttcaggggttgtatggactccatttatttgaatgggcaggagctccctttaaacagcaaacccagaagctatgcacacatcgaagagtcggtggatgtatctccaggctgcttcctgacggccacggaagactgcgccagcaacccttgccagaatggaggcgtttgcaatccgtcacctgctggaggttattactgcaaatgcagtgccttgtacatagggacccactgtgagataagcgtcaatccgtgttcctccaacccatgcctctatgggggcacgtgtgttgtcgacaacggaggctttgtttgccagtgtagaggattatatactggtcagaggtgtcagcttagtccatactgcaaagatgaaccctgtaagaatggcggaacatgctttgacagtttggatggcgccgtttgtcagtgtgattcgggttttaggggagaaaggtgtcagagtgatatcgacgagtgctctggaaacccttgcctgcacggggccctctgtgagaacacgcacggctcctatcactgcaactgcagccacgagtacaggggacgtcactgcgaggatgctgcgcccaaccagtatgtgtccacgccgtggaacattgggttggcggaaggaattggaatcgttgtgtttgttgcagggatatttttactggtggtggtgtttgttctctgccgtaagatgattagtcggaaaaagaagcatcaggctgaacctaaagacaagcacctgggacccgctacggctttcttgcaaagaccgtattttgattccaagctaaataagaacatttactcagacataccaccccaggtgcctgtccggcctatttcctacaccccgagtattccaagtgactcaagaaacaatctggaccgaaattccttcgaaggatctgctatcccagagcatcccgaattcagcacttttaaccccgagtctgtgcacgggcaccgaaaagcagtggcggtctgcagcgtggcgccaaacctgcctcccccacccccttcaaactccccttctgacagcgactccatccagaagcctagctgggactttgactatgacacaaaagtggtggatcttgatccctgtctttccaagaagcctctagaggaaaagccttcccagccatacagtgcccgggaaagcctgtctgaagtgcagtccctgagctccttccagtccgaatcgtgcgatgacaatgggtatcactgggatacatcagattggatgccaagcgttcctctgccggacatacaagagttccccaactatgaggtgattgatgagcagacacccctgtactcagcagatccaaacgccatcgatacggactattaccctggaggctacgacatcgaaagtgattttcctccacccccagaagacttccccgcagctgatgagctaccaccgttaccgcccgaattcagcaatcagtttgaatccatccaccctcctagagacatgcctgccgcgggtagcttgggttcttcatcaagaaaccggcagaggttcaacttgaatcagtatttgcccaatttttatcccctcgatatgtctgaacctcaaacaaaaggcactggtgagaatagtacttgtagagaaccccatgccccttacccgccagggtatcaaagacacttcgaggcgcccgctgtcgagagcatgcccatgtctgtgtacgcctccaccgcctcctgctctgacgtgtcagcctgctgcgaagtggagtccgaggtcatgatgagtgactatgagagcggggacgacggccacttcgaagaggtgacgatcccgcccctggattcccagcagcacacggaagtctgactctcaactccccccaaagtgcctgactttagtgaacctagaggtgatgtgagtaatccgcgctgttctttgcagcagtgcttccaagctttttttggtgagccgaatgggcatggctgcgctggatcctgcgcctctggacgtgctagccatttccagtgtcccaactactgtcatcgtgaggttttcatcggctgtgccatttcccaacgtcttttgggatttacatctgtctgtgttaaaataatcaaacgaaaaatcagtcctgtgttgtcagcatgattcatgtatttatatagatttgattattttaattttcctgtctcttttttttgtaaattttatgtacagatttgatttttcatagttttaactagatttccaagatattttgtgcatttgtttcaactgaattttggtggtgtcagtgccattatctagcaccctgatttttttttttttactataaccagggtttcattctgtctttttccactgaagtgtgacattttgttagtacatttcagtgtagtcattcatttctagctgtacataggatgaaggagagatcagatacatgaacatgtcttacatgggttgctgtatttagaattataaacatttttcattattggaaagtgtaacggggaccttctgcatacctgtttagaaccaaaaccaccatgacacagtttttatagtgtctgtatatttgtgatgcaatggtcttgtaaaggtttttaatgaaaactaccattagccagtctttcttactgacaataaattattaataaaat

SEQ ID NO: 571 - protein, 472 aa, Homo sapiens
MSPEEWTYLVVLLISIPIGFLFKKAGPGLKRWGAAAVGLGLTLFTCGPHTLHSLVTILGTWALIQAQPCPCHALALAWTFSYLLFFRALSLLGLPTPTPFTNAVQLLLTLKLVSLASEVQDLHLAQRKEMASGFSKGPTLGLLPDVPSLMETLSYSYCYVGIMTGPFFRYRTYLDWLEQPFPGAVPSLRPLLRRAWPAPLFGLLFLLSSHLFPLEAVREDAFYARPLPARLFYMIPVFFAFRMRFYVAWIAAECGCIAAGFGAYPVAAKARAGGGPTLQCPPPSSPEKAASLEYDYETIRNIDCYSTDFCVRVRDGMRYWNMTVQWWLAQYIYKSAPARSYVLRSAWTMLLSAYWHGLHPGYYLSFLTIPLCLAAEGRLESALRGRLSPGGQKAWDWVHWFLKMRAYDYMCMGFVLLSLADTLRYWASIYFCIHFLALAALGLGLALGGGSPSRRKAASQPTSLAPEKLREE

SEQ ID NO: 572 - DNA, 2529 bp, Homo sapiens
gttctcgactattgccgaagtgagccgaagtttgtggccccgcttccggagaactcaagctcccgattgtgcccgaaggaacccgaagggagaccccgcctcattcctcacgccgagctccagaccccgcctcctttccagagcccgtctgttccccttcgggtccaaagcttttggctcctccttgttccgagcccgaaggcccgccccttcacgtactcggagctcggatcccagtgtggacctggactcgaatcccgttgccgactcgcgctctcggcttctgctccggggcttcttccctgcccgcccggggccctgaccgtggcttcttccccggcctgatctgcgcagcccggcgggcgcccagaaggagcaggcggcgcgggggcgcgctgggcgggggaggcgtggccggagctgcggcggcaagcgggctgggactgctcggccgcctcctgcccggcgagcagctcagaccatgtcgcctgaagaatggacgtatctagtggttcttcttatctccatccccatcggcttcctctttaagaaagccggtcctgggctgaagagatggggagcagccgctgtgggcctggggctcaccctgttcacctgtggcccccacactttgcattctctggtcaccatcctcgggacctgggccctcattcaggcccagccctgcccctgccacgccctggctctggcctggactttctcctatctcctgttcttccgagccctcagcctcctgggcctgcccactcccacgcccttcaccaatgccgtccagctgctgctgacgctgaagctggtgagcctggccagtgaagtccaggacctgcatctggcccagaggaaggaaatggcctcaggcttcagcaaggggcccaccctggggctgctgcccgacgtgccctccctgatggagacactcagctacagctactgctacgtgggaatcatgacaggcccgttcttccgctaccgcacctacctggactggctggagcagcccttccccggggcagtgcccagcctgcggcccctgctgcgccgcgcctggccggccccgctcttcggcctgctgttcctgctctcctctcacctcttcccgctggaggccgtgcgcgaggacgccttctacgcccgcccgctgcccgcccgcctcttctacatgatccccgtcttcttcgccttccgcatgcgcttctacgtggcctggattgccgccgagtgcggctgcattgccgccggctttggggcctaccccgtggccgccaaagcccgggccggaggcggccccaccctccaatgcccaccccccagcagtccggagaaggcggcttccttggagtatgactatgagaccatccgcaacatcgactgctacagcacagatttctgcgtgcgggtgcgcgatggcatgcggtactggaacatgacggtgcagtggtggctggcgcagtatatctacaagagcgcacctgcccgttcctatgtcctgcggagcgcctggaccatgctgctgagcgcctactggcacggcctccacccgggctactacctgagcttcctgaccatcccgctgtgcctggctgccgagggccggctggagtcagccctgcgggggcggctgagcccagggggccagaaggcctgggactgggtgcactggttcctgaagatgcgcgcctatgactacatgtgcatgggcttcgtgctgctctccttggccgacacccttcggtactgggcctccatctacttctgtatccacttcctggccctggcagccctggggctggggctggctttaggtgggggcagccccagccggcggaaggcagcatcccagcccaccagccttgccccggagaagctccgggaggagtaagctgtcacgacgctccctctgccagctggtcccgggaattctgtgaaccaggctgctgtctcctccccagaaagagtccttaccttggagagggtcctggagagaatttcctcttccccagctaaataccctgcctgcaactgaagcagacccgggggtgtcctccctgccctctgcccagaggccacctccactcctacaaaatcaaagtattgtccagacaagagtcactggcccctgctccagcttctgggtatccagagagcactgcacttccccaaaacggaaggggcccctgggcagtgggttttgggcaaattccctttctttgcatccacaatgtggggtcggagcttgggggcaggtcctgggagtgggaagcctcttccttgtgtctttcgctccacttttagctcatcgcaccaatattgcagacttggaaggaagcataagcttcccatttcacaaaggggaaactgaggtgcgggtgcgcgggcctggggacggccgtcccatggcttccatctgagccacctcgggaccccagcgctcctggcgccctcttctcatcgcttggcctatgacaggtcaccgtgtgtaaatctttcccaataaagtgttgcacaaag

SEQ ID NO: 573-574 - skipped (2 entries)

SEQ ID NO: 575 - DNA, 5047 bp, Homo sapiens
atgggtggaaacatgattcaaacttacacaatttttcttgctatttttcaaatatgaatcttactatatattctcggtgaacaccaggagactattaaagaggtctgctgttaactgtaaagaaaaaatgctcgtagctatttgcttcctggtattggagcagttcagttgtttagtttataccattggattcaattcattgcaccatggttgccaaaagtgcctgaggtcataatggattgttaaaataactaaattccagtggttggaaactctaggtttgtaccattttttctgctgtgggaaaaaacaacaacaacaacatgatcaaggtaacatcacatttgatgtataatattatactattaatggaatatcagtagacaactgttaacccattagtagcatgagtataaacagtacacctgaataaattggagacattagccactaggtttaacagtggaatcttgatttgcctaggtgacttctgggattactgtttgacaaataagagtaacattttatttcatttcagaatttacgtcactttttagctacaagagtaggaagaaggtaatcggcaaggcagaagagtatactctttgccttaggatagcgtaaactcaggctgagacatacccggcttatagagttcttctagatgtgtagactgtaaatgcccaaatcctctcaactaaagttttagtgattccacaaagcctctcatgtaaatttccagtgattccaccattgcacttgtgaatatgtatccttgttagtacccagggatgtcctcgagcaccagttttattttatctgccattgcatctggattccattacagcctctcagctgttactgcctgtggacagttacttctgcttactgcctgtagagagttacctaacttctcttctcagttcttcctcaggtcctggctattttggcctcagttgaagggagtcttgctctcatctctgagggttttaagtttgtttgatcccattgttgtcttttctagctttgagcatgtttttcagtattcatattttaacttactgagaacattaaagggaaatgataaactcgtggtggggatatggcagacaggtgcttgtttgtttgagagaagtagcagaagagataaaatacaaagtgctatatgtttcagctggagaggaaagagagagaatttattagattatatacttgtcccatggcataccacgtatatgtttaaatagggacacatctccctatgtttaactatacttataaacaactttgatacacattgcgtcttttattctgtcacctgatattttagtgtatctcaagttacagattacatgtgtccttaaactatttctgaatttggacttagttccatatacagaaagaactttagaaaattcattaatttggatcttctattgatagccataaatattatgtttatgtattctaaaacctctttgtttagttagtactgttcatgaatgtaacaagcttcaatttctcatttgtgagtagtacatttgctttttgtttgtttgtttgtttgtttttgagatggagtctcacgctgtcaccaggctggagtgcagtggcgcgatttcagctcactgcaacctccacctcccaggtgcaagtgatgcccctgcctcagcctcccgagtagctgggactacagacacccgccaccacacctggctaatttttgtatttttagtagagacggggtttcaccatgttggctaggctggtctcaaactcttggcctcgtgatttgcccgcctctgcctccccaaagtgctgggattacaggcgtgagccaccacgcccagccgtacatttactttttaaagcagcagactaggtacactaattctcactcaaatattttcatgggaatgtagttatcaccaagtcctaaagtattatttatgccaaaaaaaatttcattttaaggactacaaaaatgattctaattaaacattttataatcaatagtaggttgggtctttagccattatatgtgtatatatacagacacatatgtatacacttacattttgacagggtcttcattgagtcttgatgcactttaaacccagctggctaccagagatgcgaaggtgggctctttgaagattagcaatggacgtttctgtcacttgagaaaaggaaagttctttgcctttaaattacacagttttcatcatgcccacaatctatattattggctggttaaacagcactgccctattagcaatgttaacaaaaatgaaattatttattggcggttatagattatctaattcaggaaatttctgagctcaacttttacagcaactgttatgccttctaatttagcaattgagttatgagtaagttttgtgcttaactcctagaccctattgttgataaccagatcaaatatagtctgtacagaggaaaacactgggaacatttagtatttctaaagcctcctttggagttactactgattgtaatttggaactgataataggtagagattgctaacactgttttttttcctggatcttttttatgccagaaattaaacaggttctgctaactctttttttctcttggttatcaccagaatgaaaatatttaaagtgatgactctagaaaagccatctgtgcctggttaacattgagtttgagtctcttcaatatatattgatcatgtattgattaatctttattttttcatattttggctagacaaattcagatctatataatggaataccccttcttgagtgaactatactactaatctacatgattatatagtaaggaaaaaagaagaaataactgtaataggcatagtgtttgttgttggttgtcttgtcattcatgtgatactactcatttccaaaattcacacaaacttacatgaggtggattatttgttttgttcattatttagttcctatatgttttttctttagaaacagagtctcattctgtcacccaggctggagtccaatggggcggtcatagttcactgcagccttgaactctttggctcatgtgatcctcccatctcagcctcccacagcaggtgagactacaggtacatgccactgtgcctgactttttaatttttttgtagagacgaggtttcagtttgttgcccaagctgatcttgaactcctggtttcaagcgatcctcccacctcggcctcccaaagtagtgggatttcaggcatgaccacctggcctagttcctatacttttcttaattcttcagacttctcacatttagtatagtgcattcatttcatcttgctgtttattagcaccctttgtggccaagggaaataaaaggtggtaaaattcagttttcagtttagttcttgaaagctctgggaaatggaggaaacacaaaactatgaattaaactagggctgttgatttctgaacccccagataaatcagttgacccacattttcattttaggtgttaggtccaaattagcataatgtcttgcattattattaggttcagtgtgaaaccttacagtgctgcatttgaagtttagtaactggttattattaatcatttgggaaaaatgaaaatgtgttgggactttctatgactaggcatttgttgattatttttcatgattgctttttgttttctcattgtgtaggatttgtgaacttgtatattacaggaaacaagatactttgtaaaatttactggggaaaatccatttggagtgcatgacatttgccaggataagaaagcagtaatatgtttgtattataaaattacaccctgccagaaaactttctttcctagtaaggtaaatgtagaagggacttttacagcatagtaagttgattaggagccaaaattttattccagttttttttgaactaagaatgttttaaattctgtaatgaacttttatgtttacccattactcatgcattctttcacaatatgtttaatagcctgaggaaataggaaagctgtgaagctactaccattctttacttttaataagaataataggaaagaaaagtcaggtcagtaatccaaatccaaatatgtatactgcaaatgctcaagaagtcacattttttgataaatcgtattgagtacagaagaacttatatgaatttattatctgttaataacttagttttgacaacagaataacatttggaaattgtgagaataatcaagctgtttttccattaacagtgtaaattcataacatgtccttcaaaaggtgatattctaagctgtcttaattgtctacggttgataacttttaaataaagtacaggactttctgaaagtgtttggcatgttatgctgccaaaaacaatctgtgttttgaaataccaattaatcagttaatttctgaagactttgtataggacttgatatatgagtcagaatctgtctgtactcattctgtacattgtaactttgaacacttatgaaaaactgtatctgttggtgtgttttgattagttagtgtagatttgtttgcgtatttgaattccgattttagtttaggaagactaaaagtagccatttttgtaaagttcatatgctattttttaatgtcattcttgtttttaatatttatacaatagtgatgttactagtaaaaaatgtttatagataacacgtagagctattaactgttcaaaagcctacatgataggcatattttgtatctcgtgttgcactcgttctgtttcatattggactttttacatcccttttttagcaaaaaaaagagacacatttgaattctctttagcataaagctgtgcattggaaactatgtgactgtatccatacggttagcaaaatactctttgccaccaaaggtaaatgaaactgtaaaatacctctggatatttgtgccaatgaacttttcttagcatattaggattaaagcaaaaataatcttttcagtatgtttcatctaggacttacaataaatgtttaaaccatgaaaacttaaaaaaaaaaaaaaaaaaa

SEQ ID NO: 576 - protein, 774 aa, Homo sapiens
MERPLCSHLCSCLAMLALLSPLSLAQYDSWPHYPEYFQQPAPEYHQPQAPANVAKIQLRLAGQKRKHSEGRVEVYYDGQWGTVCDDDFSIHAAHVVCRELGYVEAKSWTASSSYGKGEGPIWLDNLHCTGNEATLAACTSNGWGVTDCKHTEDVGVVCSDKRIPGFKFDNSLINQIENLNIQVEDIRIRAILSTYRKRTPVMEGYVEVKEGKTWKQICDKHWTAKNSRVVCGMFGFPGERTYNTKVYKMFASRRKQRYWPFSMDCTGTEAHISSCKLGPQVSLDPMKNVTCENGLPAVVSCVPGQVFSPDGPSRFRKAYKPEQPLVRLRGGAYIGEGRVEVLKNGEWGTVCDDKWDLVSASVVCRELGFGSAKEAVTGSRLGQGIGPIHLNEIQCTGNEKSIIDCKFNAESQGCNHEEDAGVRCNTPAMGLQKKLRLNGGRNPYEGRVEVLVERNGSLVWGMVCGQNWGIVEAMVVCRQLGLGFASNAFQETWYWHGDVNSNKVVMSGVKCSGTELSLAHCRHDGEDVACPQGGVQYGAGVACSETAPDLVLNAEMVQQTTYLEDRPMFMLQCAMEENCLSASAAQTDPTTGYRRLLRFSSQIHNNGQSDFRPKNGRHAWIWHDCHRHYHSMEVFTHYDLLNLNGTKVAEGHKASFCLEDTECEGDIQKNYECANFGDQGITMGCWDMYRHDIDCQWVDITDVPPGDYLFQVVINPNFEVAESDYSNNIMKCRSRYDGHRIWMYNCHIGGSFSEETEKKFEHFSGLLNNQLSPQ

SEQ ID NO: 577 - DNA, 3432 bp, Homo sapiens
actccagcgcgcggctacctacgcttggtgcttgctttctccagccatcggagaccagagccgccccctctgctcgagaaaggggctcagcggcggcggaagcggagggggaccaccgtggagagcgcggtcccagcccggccactgcggatccctgaaaccaaaaagctcctgctgcttctgtaccccgcctgtccctcccagctgcgcagggccccttcgtgggatcatcagcccgaagacagggatggagaggcctctgtgctcccacctctgcagctgcctggctatgctggccctcctgtcccccctgagcctggcacagtatgacagctggccccattaccccgagtacttccagcaaccggctcctgagtatcaccagccccaggcccccgccaacgtggccaagattcagctgcgcctggctgggcagaagaggaagcacagcgagggccgggtggaggtgtactatgatggccagtggggcaccgtgtgcgatgacgacttctccatccacgctgcccacgtcgtctgccgggagctgggctatgtggaggccaagtcctggactgccagctcctcctacggcaagggagaagggcccatctggttagacaatctccactgtactggcaacgaggcgacccttgcagcatgcacctccaatggctggggcgtcactgactgcaagcacacggaggatgtcggtgtggtgtgcagcgacaaaaggattcctgggttcaaatttgacaattcgttgatcaaccagatagagaacctgaatatccaggtggaggacattcggattcgagccatcctctcaacctaccgcaagcgcaccccagtgatggagggctacgtggaggtgaaggagggcaagacctggaagcagatctgtgacaagcactggacggccaagaattcccgcgtggtctgcggcatgtttggcttccctggggagaggacatacaataccaaagtgtacaaaatgtttgcctcacggaggaagcagcgctactggccattctccatggactgcaccggcacagaggcccacatctccagctgcaagctgggcccccaggtgtcactggaccccatgaagaatgtcacctgcgagaatgggctgccggccgtggtgagttgtgtgcctgggcaggtcttcagccctgacggaccctcgagattccggaaagcatacaagccagagcaacccctggtgcgactgagaggcggtgcctacatcggggagggccgcgtggaggtgctcaaaaatggagaatgggggaccgtctgcgacgacaagtgggacctggtgtcggccagtgtggtctgcagagagctgggctttgggagtgccaaagaggcagtcactggctcccgactggggcaagggatcggacccatccacctcaacgagatccagtgcacaggcaatgagaagtccattatagactgcaagttcaatgccgagtctcagggctgcaaccacgaggaggatgctggtgtgagatgcaacacccctgccatgggcttgcagaagaagctgcgcctgaacggcggccgcaatccctacgagggccgagtggaggtgctggtggagagaaacgggtcccttgtgtgggggatggtgtgtggccaaaactggggcatcgtggaggccatggtggtctgccgccagctgggcctgggattcgccagcaacgccttccaggagacctggtattggcacggagatgtcaacagcaacaaagtggtcatgagtggagtgaagtgctcgggaacggagctgtccctggcgcactgccgccacgacggggaggacgtggcctgcccccagggcggagtgcagtacggggccggagttgcctgctcagaaaccgcccctgacctggtcctcaatgcggagatggtgcagcagaccacctacctggaggaccggcccatgttcatgctgcagtgtgccatggaggagaactgcctctcggcctcagccgcgcagaccgaccccaccacgggctaccgccggctcctgcgcttctcctcccagatccacaacaatggccagtccgacttccggcccaagaacggccgccacgcgtggatctggcacgactgtcacaggcactaccacagcatggaggtgttcacccactatgacctgctgaacctcaatggcaccaaggtggcagagggccacaaggccagcttctgcttggaggacacagaatgtgaaggagacatccagaagaattacgagtgtgccaacttcggcgatcagggcatcaccatgggctgctgggacatgtaccgccatgacatcgactgccagtgggttgacatcactgacgtgccccctggagactacctgttccaggttgttattaaccccaacttcgaggttgcagaatccgattactccaacaacatcatgaaatgcaggagccgctatgacggccaccgcatctggatgtacaactgccacataggtggttccttcagcgaagagacggaaaaaaagtttgagcacttcagcgggctcttaaacaaccagctgtccccgcagtaaagaagcctgcgtggtcaactcctgtcttcaggccacaccacatcttccatgggacttccccccaacaactgagtctgaacgaatgccacgtgccctcacccagcccggcccccaccctgtccagacccctacagctgtgtctaagctcaggaggaaagggaccctcccatcattcatggggggctgctacctgacccttggggcctgagaaggccttgggggggtggggtttgtccacagagctgctggagcagcaccaagagccagtcttgaccgggatgaggcccacagacaggttgtcatcagcttgtcccattcaagccaccgagctcaccacagacacagtggagccgcgctcttctccagtgacacgtggacaaatgcgggctcatcagcccccccagagagggtcaggccgaaccccatttctcctcctcttaggtcattttcagcaaacttgaatatctagacctctcttccaatgaaaccctccagtctattatagtcacatagataatggtgccacgtgttttctgatttggtgagctcagacttggtgcttccctctccacaacccccaccccttgtttttcaagatactattattatattttcacagacttttgaagcacaaatttattggcatttaatattggacatctgggcccttggaagtacaaatctaaggaaaaaccaacccactgtgtaagtgactcatcttcctgttgttccaattctgtgggtttttgattcaacggtgctataaccagggtcctgggtgacagggcgctcactgagcaccatgtgtcatcacagacacttacacatacttgaaacttggaataaaagaaagatttatg

SEQ ID NO: 578 - protein, 192 aa, Homo sapiens
MQAIKCVVVGDGAVGKTCLLISYTTNAFPGEYIPTVFDNYSANVMVDSKPVNLGLWDTAGQEDYDRLRPLSYPQTDVFLICFSLVSPASYENVRAKWFPEVRHHCPSTPIILVGTKLDLRDDKDTIEKLKEKKLAPITYPQGLALAKEIDSVKYLECSALTQRGLKTVFDEAIRAVLCPQPTRQQKRACSLL

SEQ ID NO: 579 - DNA, 1516 bp, Homo sapiens
tgccccaccaccgctgctcctcagcaggcgcctcaccagcctccacaccccttgcgcccgcagaaacgcgcctggccctgagctgtcaccaccgacactctccaggctccggacacgatgcaggccatcaagtgtgtggtggtgggagatggggccgtgggcaagacctgccttctcatcagctacaccaccaacgcctttcccggagagtacatccccaccgtgtttgacaactattcagccaatgtgatggtggacagcaagccagtgaacctggggctgtgggacactgctgggcaggaggactacgaccgtctccggccgctctcctatccacagacggacgtcttcctcatctgcttctccctcgtcagcccagcctcttatgagaacgtccgcgccaagtggttcccagaagtgcggcaccactgccccagcacacccatcatcctggtgggcaccaagctggacctgcgggacgacaaggacaccatcgagaaactgaaggagaagaagctggctcccatcacctacccgcagggcctggcactggccaaggagattgactcggtgaaatacctggagtgctcagctctcacccagagaggcctgaaaaccgtgttcgacgaggccatccgggccgtgctgtgccctcagcccacgcggcagcagaagcgcgcctgcagcctcctctaggggttgcaccccagcgctcccacctagatgggtctgatcctccaggatccccacccaaagcctgatggcaccccggctggccatgctgtcccctccctgtggcgtttcttagcagatggctgcagagcttcgttgatggtcttttctgtactggaggcctcctgaggccaggaacgtgcaaatttgcaggtgctgcatcccaagcccctcatgctcctgccttcctgagggccagaggggagccccaggacccattaagccacccccgtgttcctgccgtcagtgccaactgccgcatgtggaagcatctacccgttcactccagtcccaccccacgcctgactcccctctggaaactgcaggccagatggttgctgccacaacttgtgtaccttcagggatggggctcttactccctcctgaggccagctgctctaatatcgatggtcctgcttgccagagagttcctctacccagcaaaaatgagtgtctcagaagtgtgctcctctggcctcagttctcctcttttggaacaacataaaacaaatttaattttctacgcctctggggatatctgctcagccaatggaaaatctgggttcaaccagcccctgccatttcttaagactttctgctgcactcacaggatcctgagctgcacttacctgtgagagtcttcaaacttttaaaccttgccagtcaggacttttgctattgcaaatagaaaacccaactcaacctgcttaagcagaaaataaatttattgattcaaaaaaaaaaaaaaaaaaaaaaaaaaaaaaaaaaaaaaaaaaaaaaaaaa

SEQ ID NO: 580 - protein, 610 aa, Homo sapiens
MIASQFLSALTLVLLIKESGAWSYNTSTEAMTYDEASAYCQQRYTHLVAIQNKEEIEYLNSILSYSPSYYWIGIRKVNNVWVWVGTQKPLTEEAKNWAPGEPNNRQKDEDCVEIYIKREKDVGMWNDERCSKKKLALCYTAACTNTSCSGHGECVETINNYTCKCDPGFSGLKCEQIVNCTALESPEHGSLVCSHPLGNFSYNSSCSISCDRGYLPSSMETMQCMSSGEWSAPIPACNVVECDAVTNPANGFVECFQNPGSFPWNTTCTFDCEEGFELMGAQSLQCTSSGNWDNEKPTCKAVTCRAVRQPQNGSVRCSHSPAGEFTFKSSCNFTCEEGFMLQGPAQVECTTQGQWTQQIPVCEAFQCTALSNPERGYMNCLPSASGSFRYGSSCEFSCEQGFVLKGSKRLQCGPTGEWDNEKPTCEAVRCDAVHQPPKGLVRCAHSPIGEFTYKSSCAFSCEEGFELYGSTQLECTSQGQWTEEVPSCQVVKCSSLAVPGKINMSCSGEPVFGTVCKFACPEGWTLNGSAARTCGATGHWSGLLPTCEAPTESNIPLVAGLSAAGLSLLTLAPFLLWLRKCLRKAKKFVPASSCQSLESDGSYQKPSYIL

SEQ ID NO: 581 - DNA, 3834 bp, Homo sapiens
cctgagacagaggcagcagtgatacccacctgagagatcctgtgtttgaacaactgcttcccaaaacggaaagtatttcaagcctaaacctttgggtgaaaagaactcttgaagtcatgattgcttcacagtttctctcagctctcactttggtgcttctcattaaagagagtggagcctggtcttacaacacctccacggaagctatgacttatgatgaggccagtgcttattgtcagcaaaggtacacacacctggttgcaattcaaaacaaagaagagattgagtacctaaactccatattgagctattcaccaagttattactggattggaatcagaaaagtcaacaatgtgtgggtctgggtaggaacccagaaacctctgacagaagaagccaagaactgggctccaggtgaacccaacaataggcaaaaagatgaggactgcgtggagatctacatcaagagagaaaaagatgtgggcatgtggaatgatgagaggtgcagcaagaagaagcttgccctatgctacacagctgcctgtaccaatacatcctgcagtggccacggtgaatgtgtagagaccatcaataattacacttgcaagtgtgaccctggcttcagtggactcaagtgtgagcaaattgtgaactgtacagccctggaatcccctgagcatggaagcctggtttgcagtcacccactgggaaacttcagctacaattcttcctgctctatcagctgtgataggggttacctgccaagcagcatggagaccatgcagtgtatgtcctctggagaatggagtgctcctattccagcctgcaatgtggttgagtgtgatgctgtgacaaatccagccaatgggttcgtggaatgtttccaaaaccctggaagcttcccatggaacacaacctgtacatttgactgtgaagaaggatttgaactaatgggagcccagagccttcagtgtacctcatctgggaattgggacaacgagaagccaacgtgtaaagctgtgacatgcagggccgtccgccagcctcagaatggctctgtgaggtgcagccattcccctgctggagagttcaccttcaaatcatcctgcaacttcacctgtgaggaaggcttcatgttgcagggaccagcccaggttgaatgcaccactcaagggcagtggacacagcaaatcccagtttgtgaagctttccagtgcacagccttgtccaaccccgagcgaggctacatgaattgtcttcctagtgcttctggcagtttccgttatgggtccagctgtgagttctcctgtgagcagggttttgtgttgaagggatccaaaaggctccaatgtggccccacaggggagtgggacaacgagaagcccacatgtgaagctgtgagatgcgatgctgtccaccagcccccgaagggtttggtgaggtgtgctcattcccctattggagaattcacctacaagtcctcttgtgccttcagctgtgaggagggatttgaattatatggatcaactcaacttgagtgcacatctcagggacaatggacagaagaggttccttcctgccaagtggtaaaatgttcaagcctggcagttccgggaaagatcaacatgagctgcagtggggagcccgtgtttggcactgtgtgcaagttcgcctgtcctgaaggatggacgctcaatggctctgcagctcggacatgtggagccacaggacactggtctggcctgctacctacctgtgaagctcccactgagtccaacattcccttggtagctggactttctgctgctggactctccctcctgacattagcaccatttctcctctggcttcggaaatgcttacggaaagcaaagaaatttgttcctgccagcagctgccaaagccttgaatcagacggaagctaccaaaagccttcttacatcctttaagttcaaaagaatcagaaacaggtgcatctggggaactagagggatacactgaagttaacagagacagataactctcctcgggtctctggcccttcttgcctactatgccagatgcctttatggctgaaaccgcaacacccatcaccacttcaatagatcaaagtccagcaggcaaggacggccttcaactgaaaagactcagtgttccctttcctactctcaggatcaagaaagtgttggctaatgaagggaaaggatattttcttccaagcaaaggtgaagagaccaagactctgaaatctcagaattccttttctaactctcccttgctcgctgtaaaatcttggcacagaaacacaatattttgtggctttctttcttttgcccttcacagtgtttcgacagctgattacacagttgctgtcataagaatgaataataattatccagagtttagaggaaaaaaatgactaaaaatattataacttaaaaaaatgacagatgttgaatgcccacaggcaaatgcatggagggttgttaatggtgcaaatcctactgaatgctctgtgcgagggttactatgcacaatttaatcactttcatccctatgggattcagtgcttcttaaagagttcttaaggattgtgatatttttacttgcattgaatatattataatcttccatacttcttcattcaatacaagtgtggtagggacttaaaaaacttgtaaatgctgtcaactatgatatggtaaaagttacttattctagattaccccctcattgtttattaacaaattatgttacatctgttttaaatttatttcaaaaagggaaactattgtcccctagcaaggcatgatgttaaccagaataaagttctgagtgtttttactacagttgttttttgaaaacatggtagaattggagagtaaaaactgaatggaaggtttgtatattgtcagatattttttcagaaatatgtggtttccacgatgaaaaacttccatgaggccaaacgttttgaactaataaaagcataaatgcaaacacacaaaggtataattttatgaatgtctttgttggaaaagaatacagaaagatggatgtgctttgcattcctacaaagatgtttgtcagatgtgatatgtaaacataattcttgtatattatggaagattttaaattcacaatagaaactcaccatgtaaaagagtcatctggtagatttttaacgaatgaagatgtctaatagttattccctatttgttttcttctgtatgttagggtgctctggaagagaggaatgcctgtgtgagcaagcatttatgtttatttataagcagatttaacaattccaaaggaatctccagttttcagttgatcactggcaatgaaaaattctcagtcagtaattgccaaagctgctctagccttgaggagtgtgagaatcaaaactctcctacacttccattaacttagcatgtgttgaaaaaaaaagtttcagagaagttctggctgaacactggcaacgacaaagccaacagtcaaaacagagatgtgataaggatcagaacagcagaggttcttttaaaggggcagaaaaactctgggaaataagagagaacaactactgtgatcaggctatgtatggaatacagtgttattttctttgaaattgtttaagtgttgtaaatatttatgtaaactgcattagaaattagctgtgtgaaataccagtgtggtttgtgtttgagttttattgagaattttaaattataacttaaaatattttataatttttaaagtatatatttatttaagcttatgtcagacctatttgacataacactataaaggttgacaataaatgtgcttatgttt

SEQ ID NO: 582 - protein, 1645 aa, Homo sapiens
CDRCQEGHFGFNGCGGCRPCACGPAAEGSECHPQSGQCHCRPGTMGPQCRECAPGYWGLPEQGCRRCQCPGGRCDPHTGRCNCPPGLSGERCDTCSQQHQVPVPGGPVGHSIHCEVCDHCVVLLLDDLERAGALLPAIHEQLRGINASSMAWARLHRLNASIADLQSQLRSPLGPRHETAQQLEVLEQQSTSLGQDARRLGGQAVGTRDQASQLLAGTEATLGHAKTLLAAIRAVDRTLSELMSQTGHLGLANASAPSGEQLLRTLAEVERLLWEMRARDLGAPQAAAEAELAAAQRLLARVQEQLSSLWEENQALATQTRDRLAQHEAGLMDLREALNRAVDATREAQELNSRNQERLEEALQRKQELSRDNATLQATLHAARDTLASVFRLLHSLDQAKEELERLAASLDGARTPLLQRMQTFSPAGSKLRLVEAAEAHAQQLGQLALNLSSIILDVNQDRLTQRAIEASNAYSRILQAVQAAEDAAGQALQQADHTWATVVRQGLVDRAQQLLANSTALEEAMLQEQQRLGLVWAALQGARTQLRDVRAKKDQLEAHIQAAQAMLAMDTDETSKKIAHAKAVAAEAQDTATRVQSQLQAMQENVERWQGQYEGLRGQDLGQAVLDAGHSVSTLEKTLPQLLAKLSILENRGVHNASLALSASIGRVRELIAQARGAASKVKVPMKFNGRSGVQLRTPRDLADLAAYTALKFYLQGPEPEPGQGTEDRFVMYMGSRQATGDYMGVSLRDKKVHWVYQLGEAGPAVLSIDEDIGEQFAAVSLDRTLQFGHMSVTVERQMIQETKGDTVAPGAEGLLNLRPDDFVFYVGGYPSTFTPPPLLRFPGYRGCIEMDTLNEEVVSLYNFERTFQLDTAVDRPCARSKSTGDPWLTDGSYLDGTGFARISFDSQISTTKRFEQELRLVSYSGVLFFLKQQSQFLCLAVQEGSLVLLYDFGAGLKKAVPLQPPPPLTSASKAIQVFLLGGSRKRVLVRVERATVYSVEQDNDLELADAYYLGGVPPDQLPPSLRWLFPTGGSVRGCVKGIKALGKYVDLKRLNTTGVSAGCTADLLVGRAMTFHGHGFLRLALSNVAPLTGNVYSGFGFHSAQDSALLYYRASPDGLCQVSLQQGRVSLQLLRTEVKTQAGFADGAPHYVAFYSNATGVWLYVDDQLQQMKPHRGPPPELQPQPEGPPRLLLGGLPESGTIYNFSGCISNVFVQRLLGPQRVFDLQQNLGSVNVSTGCAPALQAQTPGLGPRGLQATARKASRRSRQPARHPACMLPPHLRTTRDSYQFGGSLSSHLEFVGILARHRNWPSLSMHVLPRSSRGLLLFTARLRPGSPSLALFLSNGHFVAQMEGLGTRLRAQSRQRSRPGRWHKVSVRWEKNRILLVTDGARAWSQEGPHRQHQGAEHPQPHTLFVGGLPASSHSSKLPVTVGFSGCVKRLRLHGRPLGAPTRMAGVTPCILGPLEAGLFFPGSGGVITLDLPGATLPDVGLELEVRPLAVTGLIFHLGQARTPPYLQLQVTEKQVLLRADDGAGEFSTSVTRPSVLCDGQWHRLAVMKSGNVLRLEVDAQSNHTVGPLLAAAAGAPAPLYLGGLPEPMAVQPWPPAYCGCMRRLAVNRSPVAMTRSVEVHGAVGASGCPAA

SEQ ID NO: 583 - DNA, 5117 bp, Homo sapiens
gctgtgaccgctgccaggagggacattttggtttcaatggctgcgggggctgccgcccgtgtgcttgtggaccggccgccgagggctccgagtgccacccccagagcggacagtgccactgccgaccagggaccatgggaccccagtgccgcgagtgtgcccctggctactgggggctccctgagcagggctgcaggcgctgccagtgccctgggggccgctgtgaccctcacacgggccgctgcaactgccccccggggctcagcggggagcgctgcgacacctgcagccagcagcatcaggtgcctgttccaggcgggcctgtgggccacagcatccactgtgaagtgtgtgaccactgtgtggtcctgctcctggatgacctggaacgggccggcgccctcctccccgccattcacgagcaactgcgtggcatcaatgccagctccatggcctgggcccgtctgcacaggctgaacgcctccatcgctgacctgcagagccagctccggagccccctgggcccccgccatgagacggcacagcagctggaggtgctggagcagcagagcacaagcctcgggcaggacgcacggcggctaggcggccaggccgtggggacccgagaccaggcgagccaattgctggccggcaccgaggccacactgggccatgcgaagacgctgttggcggccatccgggctgtggaccgcaccctgagcgagctcatgtcccagacgggccacctggggctggccaatgcctcggctccatcaggtgagcagctgctccggacactggccgaggtggagcggctgctctgggagatgcgggcccgggacctgggggccccgcaggcagcagctgaggctgagttggctgcagcacagagattgctggcccgggtgcaggagcagctgagcagcctctgggaggagaaccaggcactggccacacaaacccgcgaccggctggcccagcacgaggccggcctcatggacctgcgagaggctttgaaccgggcagtggacgccacacgggaggcccaggagctcaacagccgcaaccaggagcgcctggaggaagccctgcaaaggaagcaggagctgtcccgggacaatgccaccctgcaggccactctgcatgcggctagggacaccctggccagcgtcttcagattgctgcacagcctggaccaggctaaggaggagctggagcgcctcgccgccagcctggacggggctcggaccccactgctgcagaggatgcagaccttctccccggcgggcagcaagctgcgtctagtggaggccgccgaggcccacgcacagcagctgggccagctggcactcaatctgtccagcatcatcctggacgtcaaccaggaccgcctcacccagagggccatcgaggcctccaacgcctacagccgcatcctgcaggccgtgcaggctgccgaggatgctgctggccaggccctgcagcaggcggaccacacgtgggcgacggtggtgcggcagggcctggtggaccgagcccagcagctcctggccaacagcactgcactagaagaggccatgctccaggaacagcagaggctgggccttgtgtgggctgccctccagggtgccaggacccagctccgagatgtccgggccaagaaggaccagctggaggcgcacatccaggcggcgcaggccatgcttgccatggacacagacgagacaagcaagaagatcgcacatgccaaggctgtggctgctgaagcccaggacaccgccacccgtgtgcagtcccagctgcaggccatgcaggagaatgtggagcggtggcagggccagtacgagggcctgcggggccaggacctgggccaggcagtgcttgacgcaggccactcagtgtccaccctggagaagacgctgccccagctgctggccaagctgagcatcctggagaaccgtggggtgcacaacgccagcctggccctgtccgccagcattggccgcgtgcgagagctcattgcccaggcccggggggctgccagtaaggtcaaggtgcccatgaagttcaacgggcgctcaggggtgcagctgcgcaccccacgggatcttgccgaccttgctgcctacactgccctcaagttctacctgcagggcccagagcctgagcctgggcagggtaccgaggatcgctttgtgatgtacatgggcagccgccaggccactggggactacatgggtgtgtctctgcgtgacaagaaggtgcactgggtgtatcagctgggtgaggcgggccctgcagtcctaagcatcgatgaggacattggggagcagttcgcagctgtcagcctggacaggactctccagtttggccacatgtccgtcacagtggagagacagatgatccaggaaaccaagggtgacacggtggcccctggggcagaggggctgctcaacctgcggccagacgacttcgtcttctacgtcggggggtaccccagtaccttcacgccccctcccctgcttcgcttccccggctaccggggctgcatcgagatggacacgctgaatgaggaggtggtcagcctctacaacttcgagaggaccttccagctggacacggctgtggacaggccttgtgcccgctccaagtcgaccggggacccgtggctcacggacggctcctacctggacggcaccggcttcgcccgcatcagcttcgacagtcagatcagcaccaccaagcgcttcgagcaggagctgcggctcgtgtcctacagcggggtgctcttcttcctgaagcagcagagccagttcctgtgcttggccgtgcaagaaggcagcctcgtgctgttgtatgactttggggctggcctgaaaaaggccgtcccactgcagcccccaccgcccctgacctcggccagcaaggcgatccaggtgttcctgctggggggcagccgcaagcgtgtgctggtgcgtgtggagcgggccacggtgtacagcgtggagcaggacaatgatctggagctggccgacgcctactacctggggggcgtgccgcccgaccagctgcccccgagcctgcgatggctcttccccaccggaggctcagtccgtggctgcgtcaaaggcatcaaggccctgggcaagtatgtggacctcaagcggctgaacacgacaggcgtgagcgccggctgcaccgccgacctgctggtggggcgcgccatgactttccatggccacggcttccttcgcctggcgctctcgaacgtggcaccgctcactggcaacgtctactccggcttcggcttccacagcgcccaggacagtgccctgctctactaccgggcgtccccggatgggctatgccaggtgtccctgcagcagggccgtgtgagcctacagctcctgaggactgaagtgaaaactcaagcgggcttcgccgatggtgccccccattacgtcgccttctacagcaatgccacgggagtctggctgtatgtcgatgaccagctccagcagatgaagccccaccggggaccaccccccgagctccagccgcagcctgaggggcccccgaggctcctcctgggaggcctgcctgagtctggcaccatttacaacttcagtggctgcatcagcaacgtcttcgtgcagcggctcctgggcccacagcgcgtatttgatctgcagcagaacctgggcagcgtcaatgtgagcacgggctgtgcacccgccctgcaagcccagaccccgggcctggggcctagaggactgcaggccaccgcccggaaggcctcccgccgcagccgtcagcccgcccggcatcctgcctgcatgctgcccccacacctcaggaccacccgagactcctaccagtttgggggttccctgtccagtcacctggagtttgtgggcatcctggcccgacataggaactggcccagtctctccatgcacgtcctcccgcgaagctcccgaggcctcctcctcttcactgcccgtctgaggcccggcagcccctccctggcgctcttcctgagcaatggccacttcgttgcacagatggaaggcctcgggactcggctccgcgcccagagccgccagcgctcccggcctggccgctggcacaaggtctccgtgcgctgggagaagaaccggatcctgctggtgacggacggggcccgggcctggagccaggaggggccgcaccggcagcaccagggggcagagcacccccagccccacaccctctttgtgggcggcctcccggccagcagccacagctccaaacttccggtgaccgtcgggttcagcggctgtgtgaagagactgaggctgcacgggaggcccctgggggcccccacacggatggcaggggtcacaccctgcatcttgggccccctggaggcgggcctgttcttcccaggcagcgggggagttatcactttagacctcccaggagctacactgcctgatgtgggcctggaactggaggtgcggcccctggcagtcaccggactgatcttccacttgggccaggcccggacgcccccctacttgcagttgcaggtgaccgagaagcaagtcctgctgcgggcggatgacggagcaggggagttctccacgtcagtgacccgcccctcagtgctgtgtgatggccagtggcaccggctagcggtgatgaaaagcgggaatgtgctccggctggaggtggacgcgcagagcaaccacaccgtgggccccttgctggcggctgcagctggtgccccagcccctctgtacctcgggggcctgcctgagcccatggccgtgcagccctggccccccgcctactgcggctgcatgaggaggctggcggtgaaccggtcccccgtcgccatgactcgctctgtggaggtccacggggcagtgggggccagtggctgcccagccgcctaggacacagccaaccccggcccctggtcaggcccctgcagctgcctcacaccgccccttgtgctcgcctcataggtgtctatttggactctaagctctacgggtgacagatcttgtttctgaagatggtttaagttatagcttcttaaacgaaagaataaaatactgcaaaatgttttt

SEQ ID NO: 584 - protein, 170 aa, Homo sapiens
MPVMRLFPCFLQLLAGLALPAVPPQQWALSAGNGSSEVEVVPFQEVWGRSYCRALERLVDVVSEYPSEVEHMFSPSCVSLLRCTGCCGDENLHCVPVETANVTMQLLKIRSGDRPSYVELTFSQHVRCECRPLREKMKPERRRPKGRGKRRREKQRPTDCHLCGDAVPRR

SEQ ID NO: 585 - DNA, 1768 bp, Homo sapiens
ggcacgaggctgctgtctgcggaggaaactgcatcgacggacggccgcccagctacgggaggacctggagtggcactgggcgcccgacggaccatccccgggacccgcctgcccctcggcgccccgccccgccgggccgctccccgtcgggttccccagccacagccttacctacgggctcctgactccgcaaggcttccagaagatgctcgaaccaccggccggggcctcggggcagcagtgagggaggcgtccagccccccactcagctcttctcctcctgtgccaggggctccccgggggatgagcatggtggttttccctcggagccccctggctcgggacgtctgagaagatgccggtcatgaggctgttcccttgcttcctgcagctcctggccgggctggcgctgcctgctgtgcccccccagcagtgggccttgtctgctgggaacggctcgtcagaggtggaagtggtacccttccaggaagtgtggggccgcagctactgccgggcgctggagaggctggtggacgtcgtgtccgagtaccccagcgaggtggagcacatgttcagcccatcctgtgtctccctgctgcgctgcaccggctgctgcggcgatgagaatctgcactgtgtgccggtggagacggccaatgtcaccatgcagctcctaaagatccgttctggggaccggccctcctacgtggagctgacgttctctcagcacgttcgctgcgaatgccggcctctgcgggagaagatgaagccggaaaggaggagacccaagggcagggggaagaggaggagagagaagcagagacccacagactgccacctgtgcggcgatgctgttccccggaggtaacccaccccttggaggagagagaccccgcacccggctcgtgtatttattaccgtcacactcttcagtgactcctgctggtacctgccctctatttattagccaactgtttccctgctgaatgcctcgctcccttcaagacgaggggcagggaaggacaggaccctcaggaattcagtgccttcaacaacgtgagagaaagagagaagccagccacagacccctgggagcttccgctttgaaagaagcaagacacgtggcctcgtgaggggcaagctaggccccagaggccctggaggtctccaggggcctgcagaaggaaagaagggggccctgctacctgttcttgggcctcaggctctgcacagtcaagcagcccttgctttcggagctcctgtccaaaagtagggatgcggatcctgctggggccgccacggcctggctggtgggaaggccggcagcgggcggaggggatccagccacttccccctcttcttctgaagatcagaacattcagctctggagaacagtggttgcctgggggcttttgccactccttgtcccccgtgatctcccctcacactttgccatttgcttgtactgggacattgttctttccggccaaggtgccaccaccctgccccccctaagagacacatacagagtgggccccgggctggagaaagagctgcctggatgagaaacagctcagccagtggggatgaggtcaccaggggaggagcctgtgcgtcccagctgaaggcagtggcaggggagcaggttccccaagggccctggcacccccacaagctgtccctgcagggccatctgactgccaagccagattctcttgaataaagtattctagtgtggaaaaaaaaaaaaaaaaaaaaaaaaaaaaaa

SEQ ID NO: 586 - protein, 90 aa, Homo sapiens
MRDPVSSQYSSFLFWRMPIPELDLSELEGLGLSDTATYKVKDSSVGKMIGQATAADQEKNPEGDGLLEYSTFNFWRAPIASIHSFELDLL

SEQ ID NO: 587 - DNA, 1653 bp, Homo sapiens
agtcagcacgggggtgctggaagagatcgggaataatagcgcagaccaatgagcctagggagatgctttcatcgtctctccttccctcaagtgttctggaacctatcatttgaattagccgagtcaggcaggagggggcggggaatccttccgcccttcttaggaggggctgcattgcagggggagagtgaactgacagactcagtcactgaagagggaaaaggagtgagaagacaaagccgtcaaagccccaacagctttgtatttctccagcccggcgcagaccccggagctcccgaggcactccctccatctttggaacacgccagtaattgattgataacaggaagctatgagggaccctgtgagtagccagtacagttcctttcttttctggaggatgcccatcccagaactggatctgtcggagctggaaggcctgggtctgtcagatacagccacctacaaggtcaaagacagcagcgttggcaaaatgatcgggcaagcaactgcagcagaccaggagaaaaaccctgaaggtgatggcctccttgagtacagcaccttcaacttctggagagctcccattgccagcatccactccttcgaactggacttgctctaaggccaagacttctctctcccatcaccttgccctcattgtcttccctctcaagccccttcctttccactcctttcccattttaatcttgttctctccctactgtgttggtggtgctgatgaatctgccagagttgagttctatgtatttatttatctatctgtctactccatttctctcaaaagccctcaagtcacaaagtaaatggttcaagcaatggagtactgggtcacagggattcctcctttcccccccaaatattaactccagaaactaggcctgactggggacacctgagagtagtatagtagtgcaaaatggaagactgatttttgactctattataatcagcttcagagattccttaaaccttcctaatttcctgctccagggcagtaaacacaaatatttcttcaaggggtgatgaaaacctcggaagttttaatttgaggttatctgctacgaaacagtatttctaaaaggctaaagtgataagtctcttgcttttttttgatcctgctcttatattcttttttttcctcagagaaatcaggagggtagttagaggtataaaacaggaggaaatattatggaaaatgaaaatagggaaaataattgaatcattttagaagtagctaatttcttttctcaaaagagtgtcccttcttcacacctactcactttacaactttgctcctaactgtgggttgaaaactctagctaaagaaagttatcaaatcttaacatgcattcctactattatgatagtttttaaggtttcaattcaatcttctgaacggcataagtcctattttagccttacctcctgcatttgcaatacgtaatactgatcagtgggcacagttcttcagctacattgagaccctgaaatgaacaattatattctgactcgacatcttgtccccaatccttccaaaaatattgatggtgatttgtgctaccatttactcgtttatttaataaagacattcaatcccagaaaaaaaaaaaaaaaaaaaaaaaaaaaaaa

SEQ ID NO: 588 - protein, 476 aa, Homo sapiens
MMHLAFLVLLCLPVCSAYPLSGAAKEEDSNKDLAQQYLEKYYNLEKDVKQFRRKDSNLIVKKIQGMQKFLGLEVTGKLDTDTLEVMRKPRCGVPDVGHFSSFPGMPKWRKTHLTYRIVNYTPDLPRDAVDSAIEKALKVWEEVTPLTFSRLYEGEADIMISFAVKEHGDFYSFDGPGHSLAHAYPPGPGLYGDIHFDDDEKWTEDASGTNLFLVAAHELGHSLGLFHSANTEALMYPLYNSFTELAQFRLSQDDVNGIQSLYGPPPASTEEPLVPTKSVPSGSEMPAKCDPALSFDAISTLRGEYLFFKDRYFWRRSHWNPEPEFHLISAFWPSLPSYLDAAYEVNSRDTVFIFKGNEFWAIRGNEVQAGYPRGIHTLGFPPTIRKIDAAVSDKEKKKTYFFAADKYWRFDENSQSMEQGFPRLIADDFPGVEPKVDAVLQAFGFFYFFSGSSQFEFDPNARMVTHILKSNSWLHC

SEQ ID NO: 589 - DNA, 1743 bp, Homo sapiens
aaagaaggtaagggcagtgagaatgatgcatcttgcattccttgtgctgttgtgtctgccagtctgctctgcctatcctctgagtggggcagcaaaagaggaggactccaacaaggatcttgcccagcaatacctagaaaagtactacaacctcgaaaaggatgtgaaacagtttagaagaaaggacagtaatctcattgttaaaaaaatccaaggaatgcagaagttccttgggttggaggtgacagggaagctagacactgacactctggaggtgatgcgcaagcccaggtgtggagttcctgacgttggtcacttcagctcctttcctggcatgccgaagtggaggaaaacccaccttacatacaggattgtgaattatacaccagatttgccaagagatgctgttgattctgccattgagaaagctctgaaagtctgggaagaggtgactccactcacattctccaggctgtatgaaggagaggctgatataatgatctctttcgcagttaaagaacatggagacttttactcttttgatggcccaggacacagtttggctcatgcctacccacctggacctgggctttatggagatattcactttgatgatgatgaaaaatggacagaagatgcatcaggcaccaatttattcctcgttgctgctcatgaacttggccactccctggggctctttcactcagccaacactgaagctttgatgtacccactctacaactcattcacagagctcgcccagttccgcctttcgcaagatgatgtgaatggcattcagtctctctacggacctccccctgcctctactgaggaacccctggtgcccacaaaatctgttccttcgggatctgagatgccagccaagtgtgatcctgctttgtccttcgatgccatcagcactctgaggggagaatatctgttctttaaagacagatatttttggcgaagatcccactggaaccctgaacctgaatttcatttgatttctgcattttggccctctcttccatcatatttggatgctgcatatgaagttaacagcagggacaccgtttttatttttaaaggaaatgagttctgggccatcagaggaaatgaggtacaagcaggttatccaagaggcatccataccctgggttttcctccaaccataaggaaaattgatgcagctgtttctgacaaggaaaagaagaaaacatacttctttgcagcggacaaatactggagatttgatgaaaatagccagtccatggagcaaggcttccctagactaatagctgatgactttccaggagttgagcctaaggttgatgctgtattacaggcatttggatttttctacttcttcagtggatcatcacagtttgagtttgaccccaatgccaggatggtgacacacatattaaagagtaacagctggttacattgctaggcgagatagggggaagacagatatgggtgtttttaataaatctaataattattcatctaatgtattatgagccaaaatggttaatttttcctgcatgttctgtgactgaagaagatgagccttgcagatatctgcatgtgtcatgaagaatgtttctggaattcttcacttgcttttgaattgcactgaacagaattaagaaatactcatgtgcaataggtgagagaatgtattttcatagatgtgttattacttcctcaataaaaagttttattttgggcctgttcctt

SEQ ID NO: 590 - protein, 61 aa, Homo sapiens
MDPNCSCATGGSCTCTGSCKCKECKCNSCKKSCCSCCPMSCAKCAQGCICKGASEKCSCCA

SEQ ID NO: 591 - DNA, 2941 bp, Homo sapiens
gaattcatgcttggactacagcttcccgccacctcccccatcttgctttttagtttaaagcagggtcagcacatcacatgaagtcatctcctttttaggggatatcccacatgccaagactaccaagcggtaggggggtggccggctaggctgtggggagcacggagatttatttgcaaaggaggacctagacaaaagagcccccacatcctctcaggcgaggagaatggacgagagtgagaggccgacccgtgttcccgtgttactgtgtacggagtagtgggtccgagggacctaggtgtggacagggacaggcaaggcgacagcgaggagaaacgaaaatcacatcggtggcggttgctctgcacacaaactccgctcgctaccgcacgctccacgctctgcactacgccgaccggggacaggagcaggaggctgtggctgcactcagacttcgggacaggccgagctgaaaaccgtgagaggggtggggtggaggcgaccgaaacgccaaggctgggttcccggaacgcgcggggaccagggtggaaggcaacttcggggaaacgggaaaggcgaccgggacctcggggacgccccgtaccccgggcgtaaactcactcccgcgttagcgggcgccaaagcggggagggggtggtcccgtggtccgcacccaggggagctcagtggactgtgcgccttgcctttctgctgcgcaaagcccagtccaggtcatcacctcgggcggggcggactcggctgggcggactcagcggggcgggcgcaggcgcagggcgggtcctttgcgtccggccctctttcccctgaccataaaagcagccgctggctgctgggccctaccaagccttccacgtgcgccttatagcctctcaacttcttgcttgggatctccaacctcaccgcggctcgaaatggaccccaactgctcctgcgccactggtaagggatgctaggtttctggtccttaggatacctatttccccgccacaggatagatgtccctaggagtagaggtgttttttgagttctagctaagtggagtcatttatttcattgatctagtgcttttccactcagcgccttcatcatccctagaacattcctattctaatgcctcccatttcgagaggcgagaggactcaggctcataattctcctgctccatgtcacccaggtagtcggggactgctagctgagccccagtactctgcgcagttcctgggcggatgggcgacacggacttattggtttttcgggattaaggacataagcccatcctagcctctacagatagaagtaagattagcttcatgtgccctgagttggacaggagctatctatcaggcctggcaatgcactcagctggcagcatttgttgaccaactgctgttatcttctgtgtaaagttcactgcctttttctcttccttgcaggtggctcctgcacctgcactggctcctgcaaatgcaaagagtgcaaatgcaactcctgcaagaagagtgagtgcggggccatctctaggaactggggctgagccaagtcagaggcaggaaaccagagctgggctaggaggagtaggccaatgatccatttcccacatcccttcccagcaactgattcaggatcagagccagatctttagacgtgatggattcccaagtttcgttcttaaaatagacaaactgaggccaagagagtgcaccaacctaccaaacacaaacatgacacctaaggactttcctcccctaagtgtgtggttctggggagccagccttcctttgtccttctaaccccagtcactgcctttccagccttctgccaggtctggggctcagatggagataagcttttcacagaagaccctcactcgaaagatccaccacttatctcccatctccgacagtgcatgccatcctgaactaagtgtcctctggggctggggacagagcttgggccaggcttctctgggggcagggaagtcccggtcaagtctagtctgacctctcactctcccttcttccccaggctgctgctcctgctgccccatgagctgtgccaagtgtgcccagggctgcatatgcaaaggggcatcagagaagtgcagctgctgtgcctgatgtccggacagccctgctcgaagatatagaaagagtgacctgcacaaacttggaattttttttccatacaaccctgacccatttactgtattttttttaatgaaatatgtgaatgataataaaagttgctgacttaatgctggctctggttttctttgtgtgccttgaaataagggaccatacaacagagctgggatggtggattgcattgagagtcagagacctgggtgctgggaccttgtgctattatcttacacactggaggcctgttaaggcaaatcaggtactcgcctcaggtcagtttcttaaataaaaatgtaagagcgtgatgacagatgatataatgccacaggaatctgtcacagacttaagctttggtaagataaaatctattagtatgacaaaaaaaaacaccaaatccattttttatattgaacaggacaatttcagtaaatatatggaagacaagataggaaaaataaaattacactacacatttgttctggatgtatattcagacttggaaacagttcacagactggccccagtatgtgggtcacacaccttcaacaccagccaagacatccccacatggaaccatcagtcttggcctgtccaggtcactgatgtgatacttggtatctctgagagctccatgttgtgacttgtctctgaatcttcggaagtttctccctaggtcatgctgaaatccgttcctcctcaagtccagcccttggttaattcaggcaagcaaagtgactgggggagtgggggaaattacccaggatcctcccagcaagctg

SEQ ID NO: 592 - protein, 436 aa, Homo sapiens
ECEILDIIMKMCSCCECKCGPIDLLFVLDSSESIGLQNFEIAKDFVVKVIDRLSRDELVKFEPGQSYAGVVQYSHSQMQEHVSLRSPSIRNVQELKEAIKSLQWMAGGTFTGEALQYTRDQLLPPSPNNRIALVITDGRSDTQRDTTPLNVLCSPGIQVVSVGIKDVFDFIPGSDQLNVISCQGLAPSQGRPGLSLVKENYAELLEDAFLKNVTAQICIDKKCPDYTCPITFSSPADITILLEPPPDVGSHNFDTTKRFAKRLAERFLTAGRTDPAHDVRVAVVQYSGTGQQRPERASLQFLQNYTALASAVDAMDFINDATDVNDALGYVTRFYREASSGAAKKRLLLFSDGNSQGATPAAIEKAVQEAQRAGIEIFVVVVGRQVNEPHIRVLVTGKTAEYDVAYGESHLFRVPSYQALLRGVFHQTVSRKVALG

SEQ ID NO: 593 - DNA, 2291 bp, Homo sapiens
gaatgcgagattttggacatcatcatgaaaatgtgctcttgctgtgaatgcaagtgcggccccatcgacctcctgttcgtgctggacagctcagagagcattggcctgcagaacttcgagattgccaaggacttcgtcgtcaaggtcatcgaccggctgagccgggacgagctggtcaagttcgagccagggcagtcgtacgcgggtgtggtgcagtacagccacagccagatgcaggagcacgtgagcctgcgcagccccagcatccggaacgtgcaggagctcaaggaagccatcaagagcctgcagtggatggcgggcggcaccttcacgggggaggccctgcagtacacgcgggaccagctgctgccgcccagcccgaacaaccgcatcgccctggtcatcactgacgggcgctcagacactcagagggacaccacaccgctcaacgtgctctgcagccccggcatccaggtggtctccgtgggcatcaaagacgtgtttgacttcatcccaggctcagaccagctcaatgtcatttcttgccaaggcctggcaccatcccagggccggcccggcctctcgctggtcaaggagaactatgcagagctgctggaggatgccttcctgaagaatgtcaccgcccagatctgcatagacaagaagtgtccagattacacctgccccatcacgttctcctccccggctgacatcaccatcctgctggagcctccgccagacgtgggcagccacaactttgacaccaccaagcgcttcgccaagcgcctggccgagcgcttcctcacagcgggcaggacggaccccgcccacgacgtgcgggtggcggtggtgcagtacagcggcacgggccagcagcgcccagagcgggcgtcgctgcagttcctgcagaactacacggccctggccagtgccgtcgatgccatggactttatcaacgacgccaccgacgtcaacgatgccctgggctatgtgacccgcttctaccgcgaggcctcgtccggcgctgccaagaagaggctgctgctcttctcagatggcaactcgcagggcgccacgcccgctgccatcgagaaggccgtgcaggaagcccagcgggcaggcatcgagatcttcgtggtggtcgtgggccgccaggtgaatgagccccacatccgcgtcctggtcaccggcaagacggccgagtacgacgtggcctacggcgagagccacctgttccgtgtccccagctaccaggccctgctccgcggtgtcttccaccagacagtctccaggaaggtggcgctgggctagcccaccctgcacgccggcaccaaaccctgtcctcccacccctccccactcatcactaaacagagcccaagcttggaaagccaggacacaacgctgctgcctgctttgtgcagggtcctccggggctcagccctgagttggcatcacctgcgcagggccctctggggctcagctctgagctagtgtcacctgcacagggccctctgaggctcagccctgagctggcgtcacctgtgcagggccctctggggctcagccctgagctggcctcacctgggttccccaccccgggctctcctgccctgccctcctgcccgccctccctcctgcctgcgcagctccttccctaggcacctctgtgctgcatcccaccagcctgagcaagacgcctctcggggcctgtgccgcactagcctccctctcctctgtccccatagctggtttttcccaccaatcctcacctaacagttactttacaattaaactcaaagcaagctcttctcctcagcttggggcagccattggcctctgtctcgttttgggaaaccaaggtcaggaggccgttgcagacataaatctcggcgactcggccccgtctcctgagggtcctgctggtgaccggcctggaccttggccctacagccctggaggccgctgctgaccagcactgaccccgacctcagagagtactcgcaggggcgctggctgcactcaagaccctcgagattaacggtgctaaccccgtctgctcctccctcccgcagagactggggcctggactggacatgagagccccttggtgccacagagggctgtgtcttactagaaacaacgcaaacctctccttcctcagaatagtgatgtgttcgacgttttatcaaaggccccctttctatgttcatgttagttttgctccttctgtgtttttttctgaaccatatccatgttgctgacttttccaaataaaggttttcactcctc

SEQ ID NO: 594 - protein, 425 aa, Homo sapiens
MSSILPFTPPIVKRLLGWKKGEQNGQEEKWCEKAVKSLVKKLKKTGQLDELEKAITTQNVNTKCITIPRSLDGRLQVSHRKGLPHVIYCRLWRWPDLHSHHELRAMELCEFAFNMKKDEVCVNPYHYQRVETPVLPPVLVPRHTEIPAEFPPLDDYSHSIPENTNFPAGIEPQSNIPETPPPGYLSEDGETSDHQMNHSMDAGSPNLSPNPMSPAHNNLDLQPVTYCEPAFWCSISYYELNQRVGETFHASQPSMTVDGFTDPSNSERFCLGLLSNVNRNAAVELTRRHIGRGVRLYYIGGEVFAECLSDSAIFVQSPNCNQRYGWHPATVCKIPPGCNLKIFNNQEFAALLAQSVNQGFEAVYQLTRMCTIRMSFVKGWGAEYRRQTVTSTPCWIELHLNGPLQWLDKVLTQMGSPSIRCSSVS

SEQ ID NO: 595 - DNA, 2303 bp, Homo sapiens
cccggcgtcccgtcgagcccagccccgccgggggcgctcctcgccgcccgcacgccctccccagccatgtcgtccatcctgcctttcactcccccgatcgtgaagcgcctgctgggctggaagaagggcgagcagaacgggcaggaggagaaatggtgcgagaaggcggtcaagagcctggtcaagaaactcaagaagacggggcagctggacgagctggagaaggccatcaccacgcagaacgtcaacaccaagtgcatcaccatccccaggtccctggatggccggttgcaggtgtcccatcggaaggggctccctcatgtcatctactgccgcctgtggcgatggccagacctgcacagccaccacgagctgcgggccatggagctgtgtgagttcgccttcaatatgaagaaggacgaggtctgcgtgaatccctaccactaccagagagtagagacaccagttctacctcctgtgttggtgccacgccacacagagatcccggccgagttccccccactggacgactacagccattccatccccgaaaacactaacttccccgcaggcatcgagccccagagcaatattccagagaccccaccccctggctacctgagtgaagatggagaaaccagtgaccaccagatgaaccacagcatggacgcaggttctccaaacctatccccgaatccgatgtccccagcacataataacttggacctgcagccagttacctactgcgagccggccttctggtgctccatctcctactacgagctgaaccagcgcgtcggggagacattccacgcctcgcagccatccatgactgtggatggcttcaccgacccctccaattcggagcgcttctgcctagggctgctctccaatgtcaacaggaatgcagcagtggagctgacacggagacacatcggaagaggcgtgcggctctactacatcggaggggaggtcttcgcagagtgcctcagtgacagcgctatttttgtccagtctcccaactgtaaccagcgctatggctggcacccggccaccgtctgcaagatcccaccaggatgcaacctgaagatcttcaacaaccaggagttcgctgccctcctggcccagtcggtcaaccagggctttgaggctgtctaccagttgacccgaatgtgcaccatccgcatgagcttcgtcaaaggctggggagcggagtacaggagacagactgtgaccagtaccccctgctggattgagctgcacctgaatgggcctttgcagtggcttgacaaggtcctcacccagatgggctccccaagcatccgctgttccagtgtgtcttagagacatcaagtatggtaggggagggcaggcttggggaaaatggccatacaggaggtggagaaaattggaactctactcaacccattgttgtcaaggaagaagaaatctttctccctcaactgaaggggtgcacccacctgttttctgaaacacacgagcaaacccagaggtggatgttatgaacagctgtgtctgccaaacacatttaccctttggccccactttgaagggcaagaaatggcgtctgctctggtggcttaagtgagcagaacaggtagtattacaccaccggcaccctccccccagactctttttttgagtgacagctttctgggatgtcacagtccaaccagaaacgcccctctgtctaggactgcagtgtggagttcaccttggaagggcgttctaggtaggaagagcccgcacgatgcagacctcatgcccagctctctgacgcttgtgacagtgcctcttccagtgaacattcccagcccagccccgccccgttgtgagctggatagacttgggatggggagggagggagttttgtctgtctccctcccctctcagaacatactgattgggaggtgcgtgttcagcagaacctgcacacaggacagcgggaaaaatcgatgagcgccacctctttaaaaactcacttacgttgtcctttttcactttgaaaagttggaaggactgctgaggcccagtgcatatgcaatgtatagtgtctattatcacattaatctcaaagagattcgaatgacggtaagtgttctcatgaagcaggaggcccttgtcgtgggatggcatttggtctcaggcagcaccacactgggtgcgtctccagtcatctgtaagagcttgctccagattctgatgcatacggctatattggtttatgtagtcagttgcattcattaaatcaactttatcatatgctcaaaaaaaaaaaaaag

SEQ ID NO: 596 - DNA, 70665 bp, Homo sapiens
gatcatgttggtttcatcccaagtatgcaagaatggtaaaacatatgcaagtcaataaatgtgatacctcacaaaaacagaattaaaaacaaaaaccatatgatcacctcaatagacaaagaaaaaaaggatttgatcaaatccagcatccctttctaataaaaattctcaaaaactaggtatagaagggacttaccttaaagtaatagaaactatatatttcaaacccacagtcaacatcatactgaatggaaaaatttgaaagcatattctccctgagaactggaacaagacaaggatttccactttcaccaattctactgttcaccactgatgtgattgtatacctagaaaaccctaaagactcacccatagagctcctagatccataaaggaatccagtaaagtctcaagggaacacttttatactgctggtgggaatgtaaattaatacaaacactatggaaaatagcatggagattccttaaaaagctaaaagaagaactaccatttgatccagcaatctcactcctgggtaattactcaaaggaaaagaagttactgtgtgaaaaagaaatatgcacatgcatgtttatagcaaaacaattcacaactgcaaagatgtggaaccaacttaagttcacatcaaccaatgagtggataaagaaaatatgattgtatatacaccataaaatactactcagttataaaaataaacaaaataatgtctttgcagctacttagatagagctggaagttgttttttttgtttgtttgtttttgtttgtttgtttgagatggaattttgctcttgttgcccatgctggaatgcaatggtgtgatctcggctcaccgcaacctctgcctcccgggttcaagcgattctcccgcctcagtctcccaagtagctaggattacaggcatgggccaccactcctggctaactttttgtatttttagtagagatggggtttctccatgttggtcaggttggtctcgaactcccgacctcaggtgatctgcccacctcggcctcccaaagtgctgggattacaggcgtgagccactgcgcccggcctggaacttgttattctaagtaaagtgagtcagcaatgaaaaatcaaatgccgtatgttgccacttataagtgggagctaagctatgaggacacaaagacatacagagagatataatgggctttgggaactctggcagggatgctggaaggagggtgaggaataaaaggctacatattgggtacagtgtacattgcttgcctgattggtgcactataattttagaattcatccctaaagaactcattcatgtaaccaaaaaccacctgtacccccaaaaactattgaaataaaagaaataaaaagaaaacaagttttaaaaagagaaaaaaataaagaggaatgaacaaaatgttggagaaatataagattatgtatagatcaaatctacctctatttggtgtcctgaaagagatgaggagaatgggacaaacttggaaagcttatttcaagataacattcctgagaacttccccaatcttgctagagaggccaacattaaaattcagtaaatgctgaaaactccagtaagatatttcttaagaaaattattcccaagatatatagtcatcaaattatctaaggtcaaatgaaggaaaaaattttataggcagctagagagaaatgtcaggtcacctacaaagagaatggcataagacaaaaagtagaactcccagcagaaactctaaaagccagaagagattaggggccaatacttaacattctgaaagaaattccaacaaggaatttcatatccagccaaactaagcttcataattgaaggagaaataagatattttccagacaagcaaatgctgatgaaatccatcaccaccagacctgccttataagagctcctgaaggaagcactaaatattgaaagggaagaactttatgaaccatttcaaaaacacatttaagtacacaaagcagtgacactataaagcaaccacaaaaatgtctgcataataaccagctaacatcatgaagataggatcaaatctacacatatcatataaaccttgaatgtaaatggactaaattccccaattaaaaggcacagaattacaagctggttaaagaaccaagacctactggtatgttgtattattccgttttcacactgatataaagaaatacccaagaccagttagtttgtaaagaaaaaagctttaactgactcacagtttcacatagctggggaggcctcagtaaacctataatcatggcagaaggcaaaacaggaaccttcttcacaaagtgacaggagagagaaaagaagagcaaagagtgaagggggaagagcccctcaggaaaccatcagatctcatgagaattcactcactatcatgagaacaccatgagggaaactgccccaatgatccaatcacctccaaccaggtctctcccttgatgcatgtggattatctctccaagatagaacatgtcttaggccacagaacaagtcttaattattatttttttagttttaagttatatgtagtaatatttttgctcacaagaaaactagaaatctataacagaaggaatactagaaaattcacaagtatgtggaaattaaacaacacactaaaagtttaaatggatacaattagaaattacaaagaaaatttaaaaataactgagataaaatgaaaacacaaacactaaaatttatgagatgtagtgaaagtagtggtaaatgcaaaatttattgcagtaatgactacattctaatgcaagaaagatctcaattctttaacaactttacgccttgaaggaactaggaaaagaagagcaaatagttcaaatgtattaaaagaggaaaacaataacaatagatccgagataaataaacaatagaggaacattggagacctattggaagatagtcagctagatgcagccgggaagtgccactcccacagagattgggatttcatttaatgtacataatttgaacagatctccagaaggaatatgatcaatgtggatggataaaatatgcagatgctgaggctaaatatgaagaaaacttggaagcctgcctgaatgccagggctcatccctggccccgaatggcacctaggaaaggggtaagtgaagagactgagggaattcccacttttgctgtggacctctgggatcctagcttcagaggattcctgcagcatccacagacattttagctggcagggggatctcctcagagattaggcagagatgaagctgcagcaggcacagagccagggacatttgggcatgggacagctctagtagagcccagcaataagggctgaccccccagggatgctcatctccctctgagaggctctggtccaagctaacttccagggagaaataagggactgcttcctcttgggactgagacatatctgagctgcaggcctaccagaaccttccagagcttctgcctggtcactccacaagaatgtgtacacagtgcaacctctgctgcccattctgtgtgctttgctccacctggtttagttccagcagtctgggagtccttcagataccccaacacacctagaacctatccctgagtgttggtaggaaggaaccatgagcaggtccttgttacccagggctgtagcttgtggctcaggagtgccaagccaggaatctgtgtgcagcatttgagtagagtaggagcccacactctcagaaaaataagagtggcgagtttcacagtttcaagtgctgatctgggacttaggcatgcctccctccacagtgctggtctagtaggagagtgggctatctctctactgaacctctctacaagggagccccatggccctgaagacctaacaacagcaacaacaacaaaattgtgggtacagtgccaatgatcagaggtgggttccccaaggcctaagagcagaactggtgaggaggtcacttctattcatctcacaccacagaaaacaactgaaaattcaagtatacacaaatgagccatgtggctgagtaagagcctgtctactgccaactgttcacaagtgccatttactggatcgctgcccaaactacaacactaaaaatgtttactaattctccccactctgtgaaaccaaaagcaaaaatttgactacaaagaccctatacagaactttaatgctctgaaaactaccaaaaatgaagccaactgactatactcccatttacaccaaaattaaaggaatgacaacattcccagatgagaaaaagtcagcacaagatcttgagtaatttaaaaagccagtatgtcctcttaaaacgagcccactaattctgcagcaatgcttcttaacccgcctgaaatgtctgaaataactgacatgaaattaaaaatgtggatggcaacgaagctcatcaagatagaggagaaagttgaaattcaattcaaggacaccaagcaatagagtaaaattattcaagagctgaaagacaagatagccattctaggaaagaacaaaactgaacttcaggagctgaaaattttacaacaagaatttcacagtaaaactggatttattaacagcagaataaaccaagttgaggaattaatctcagagctcaaagacaagttatttgaatggacaaaaaatttttaaaaattaagaaaaatgagaaaaacttccaaaaaataaaatatggaattatgtaaagaatccaaatctacaacttgtcaacattcctgagagaggaggagaaagtacaaggaacttgggaaatatatttgagaattaggtccatgaaactttattatctcattagagaaactgaaaaatccatgaattacaaagaactccggactgattttatacaatatgaccattcccaaggtacatggtcattatatttactgaaatcaatgcaaaagaaaaattttaaggaaagctagagagcagggccaggtcacttacagagggaactcaaccaggctagcagtaaacttctcagcagaaatattacgcttgtagaaaaaaatggggcctattttcagtatcattaaaaggaagaaattcaagaaagaattttatatctctccaaactaagcttcatacgtgaatgagaaataaaattctccttggacagcaaatgctgagggaatgtatttcaactagattattcttacaagagatccttaagggagtgctaaacatagaataacaagaatgacacctgctaccacaaaagcacacttacgcatatagctcaaagtactgtgaagcaactatgcaatcaaatctacataacagacagctaacaacaaaatgaaaggattaaaattatggttattaatactaacctttaatgtaaatgtactaaacaacccatttgaaagagatagagtggcatgctggataaaaatagaagacccaaccatctgttgtattcaagagacatattttacatgtaaaaacacccatgagctcaaggtaaaagggtggagtaaaatctaccatgccaatggaaaacagaaagagcaggagtcactatttttatgtcagataaaacagattttaaactaatgtaaatgaagaaggacaatgagggccattacataacaaaaaagggtacgatcaaacaagaggacttaactaccctaaatgtatacatagctaacattggagcaccgagattcataaaacaagttcttcttggcctataaaatacttagacaatcacacaatagtaatagtagactccagaaccccactgatggcattagacatattattatggcagaaaattaacaaaggaagtctggacttaaacttgacacttacctaataaacatgttaccagttgaaggtatctgatttacaggtagcaaattagtataggtctgcagcaacctcaattcttgcctcctcagaagaaataattcgcctgaagagcataaggcagaaaaagagaccaaggcaagtttcagagcaggagtagaagtttattaaaaagctttagcacaggaaagaaaggaaagtgcacttggaagagatccaagtgggcaacttgaagaaacagtgcagtgtttaaccttgatcatagaactttatacttgggaagtgagcatgtgcagtgtgtttaggaagttgtacacatgcccatctgaggcttttctttgcttttccggtggagtgtccctgggaggtcatactccatcattgtgcttcttaatgcacatgcccaggctcactcatccaatacatgagattttattggaatcctcccttcttcctggcacctgcattcaattaacactgtaatgttaacagctgtggaccattaggagattgtctttccctgaggccggctgtcgattatcatttatagagggtcaatgggataattttcaaaccatcacctgatcatttgacattcctggtgtgtgaagggtaggggggcccttctcctgccactctaatggctatctgtaacaaacatatacagtacactccacgaaacaaccttagaatataaatttttctcatatgctcatggaacatattctaaaatcaactatatgcttgttcataaaacaagtctcagtgaattcaagcacaatctcaaacaacagtgtgataaaaatggaaatcaatatcaaagagatctctcaaaactacaaaaatccatggaaatgaaacaacttattcttgaataaaacctaggtgaacattgaaattagggcagaaatcaaaatattctttaaaattattgaaagtagagaaacagctaaccaaaatctatgggatgcaccgaaagcagtgttaagaggaaagtttatagccctaaatgcctttatcaagaagacaaaaatatctcaaattaactctctaactttgaacttaatgaaactaaaaaaaataaataaaccaacacttaagccaacagaacaaaataaaaactaaaaatagagaagaaattaatgaaatgaagatgcaaaaatccatataaaagttcagtaaaaccaatagtggctgatttgaaaaaatgaataagattgtcagactgatagctaaacaaagaaagaaaagatccaaataaacacaatcaaaaaaattgatgagttaatgggtgcagcacaccgacatggtacatttatatgtatgtaacaaacctgcacgttgtgcacatgtaccctagaacttaaagtataataaaaatatatatatatataaaaagacaaatgtgatattataactgatctcacagaaatacaaaaaatcctcagggactactatgaactactctatgcacacaaattagaacatctggaggaaataaataaattcttggaagcatacaatctcaccaggttgaatcaggaacacatttaaaccctcattagataattatcaaaatttgaagttgaatcagtaatgaagaaactaccaaccaaaaaaagtcctagaccagatagattcacagccagattttaccagatatataaagaaaaactaggctgggagcggtggctcatgcctgtaatcccagcactttgggaggccaaggggggtggattgcttgaggtcaagagttcgaggccagcctggccaacatggtgaaaccctgtctctactaaaaatatgaaaaattagccaggcatggtggcacatgcctgtattcctaactactcaggaggctgaggcaagagaatcacttgaaccagggagacagaggtttcagtaagccaagatcacgccgttgcactccagcctgggagacagagagaaactctgtcttaaaaacaaaaacaaaaacaaaaacaaaactaatgataataatcatactaaaaccattccaaaaaagtggggaggaggatcaccttcctaactcattctagcaagcaagtataaggctaataccaacatgtggcagagacacaacaacaaaaacttcaggtcaataccacttatgaacataaacacaaaagtcttcaacaaaatattagcaaaccaaattcagctgcacatcagtgaatatactatgatcaagtagactttattcctgggatgcaaggctggttcaacatacacaaataaagtgatttaagacacaagcagaattaaataaaaaaaaacaagtgatcatctcaatagatgtagaaattttttttgataaaatttaacatcccttcatgataaaaacccccaacagactaagcattgaaggaacataccatggaatactaagagccatcaaagacaaatccaccgccaacatcatattgaatgggcaaaagctcaagccattcccctagagaaatggaacaagacaagaaggcctaatctcaccactcatatttaacctagtactggatgtcttacttaggaaaatcaggcaaaataaataagcaaatgcattcaaatataaatagaagaagtcagactatctctacttatggataatataattctatacaaagaaaattctaaaaactctaccagggggcccctagaactgatcaactactttaatgaagtttcaggatacagaaccaatgtataaaaatcagtagcatttctatatacaaaaaaaaaagttcaagctgagagtgaaatcaggaacccaatcccacttacaatagccacaaggaaaatgtaatacctaggaatacagctaatcaaggaggtaaaagacctctacaagtagaatgacaaaacattgctaaaataaaccagataatgcaaataaatgaaaaacatttgttgctcataaattggaaaaataagtattttacaaatggccatactgcccaaagcaatttaaagattcaatgatattcctattactattccaatgtcattcttcacacaattagcaaagggtattcttaaatttatatgcaatcaaaaagagcctgaatagacaaaacaattataagctaaagtataaagctggaggcattgaaatatctgatttcaaatgatactataaagtcacagtaaccaaaagaacttggtactagcaaaaaaaaaaaaaaaaaaaccagatgaatagaaaactgagaaataaaccataaacctaacaccatctgatcttcaacaaaaccaaccaaaacaagcaatgaggaaaagactccctattcaataaattgtgcttggataaatccaatagcataatattaagccatatgcttaatattgagccttaagccttccttttccccatatacaaaaattaactggaaatggattaaagacttaaatgtaacacctaaaactgtagaaactcaagaagaaaagttaggaaatatcattctggacgtgggacctggcaaagatttgatgatgaagatgccaaaagtaattgcaaaaaaaaagcaaaaattgacatgtaagacctaattaaactggagagcatctgtacagcaaaagaaactatcaacagagtaaacagacaacctacagaatgggagaagatattcacaaactatgcatctgacaaaagcctaatatccagaacctatagagaacataaatcaacaagctaaaaacaaataaccccactaaaaaataggcaaagtacacaaacagacacttctcaaaagaagacatacatggggccaacaaacatataaccaattctctttatttctaatcatcagagaaatgtaaatcaaaactataatgagatgccatcttacatcagtcagattgggtgttatcacaaagtcaaaaaataacagatacaggggaggttgtgaagaaaatggaacacttatacactgttggtggaaagcagtttagagatttttcaaagaacttagaactaacatttgacctagtgatatcattactgggtatacacccaaagaaatacaaatcattctaccataaggacacatgcacacaaatgttcattacagcactattcacaatagcaaagatgtggaatcaaagcagatgtccaaaagtgggatgaataaagaaaatatggcatgtagaaatactacactaccataaaatagaacaaaatcatgtcttttgaagcaacacagatgcagctgtagatcattgtcttaagcgatttaacacaggagaagaaaaacaaatatcacacgttttcacttataagtgggaactaaatattgagtacacataagctcaaggaaggaaacaatgtacaccagggtctacttgaaggtgaaaggtgggaggagggggaggattgtaaaactacctatcggttactatgctcattaccttggtgaaaaaatattctgtatgttaaagttccacgacctgcaacttacccatataacaaaactgcgcatgtaccctgtgaacctaaaattaaagttggagacaaaaaataaaagaaatgaaattgggaactgatatggcttggctctgtgtcccaaataaatctcaccttgaattgtaataatccctacttgttatggaagggacttggtggaaagtaattgaatcatgggggagctttttcagatgctgttctcatgatagtgattagagaaacagactacaacaggggcattgctcctgattttagaggaataaaaaaatgacaaaaggagaatactatgaataattgtattcacaaaaaccaatttaatgtaaataaataaattctagaaaatgcactctattaatactgactcatgaagaaataagaaaatatctgaattcacctgagaaaagtaaggcaattgataaaaaagctctcaaaaacaacaacaacaggaacatatgatttcactggagaattcaatcaaacacttaaataattaacactaatatttctcaaaaaaaaatttaagcgaacactaagagcctcattctatgaggccattattaccctgaaaacaaaccagacaacatcacaagggaaaaattattacagactaatatccattatgaatactaatacaaactacttcaacaaaatattagcaaactgaggttctctgttaaaagaaaacatagagaaaatatttttgacagatttgtaatcatgtattggatatgacaaaggtagcaagagaaaatagataaactggatttcatccaaatcaaaaacttctctccatcaaagggcattattatttagttgtgaaaaggcaacctatagaatatgagaaaatatttgcaaatgatatattttatgagacattaatatccagagtatttaaagaactcctgcaacacaacaaaaagaaataaataaagcgactaaactcaaaaattggtaaaatcttgagtagtcatttttaaagaaggtacacaaatggcccataagaaagtttaaatatttttactatcagtagccacagcaggaatccaaataaaaacgataaaataccacttcacaacacttaggaaggtgaaaattaactactgttgttaataacttggagaaattgaaaatcttaagatttctggtaggatgtaaaatatcagagaaaatgtgtaaaattgttgatttctgaaaatgttaaacacataattactatatagtgtataaattacacacccaggtatataacactcaaaagaattgaaagcaggaactaaaagagatatatacagagtagtgtttgtagcagtttgttttacaatagccaaaaggaggaaacaacccatatttctatcaacagatgaatagataaaacattcatgatataaacacacaaagggatacacatacaataaatatacacatacaatggaatattattcagccttgaaaataatgaaatcctaaaagatgcttcaacatagatgaaccttggaaacattatgctgagtcaaataagccagagacaaaatgacaaatattaaataatttcacatatataatgtacctataataagcaaatttatacagttagaaagtagattagcagttagtatgggatatggcaagggaggaacggaaagtcattgtttaatggttacacagtatttgattaggatggagaaaaagttctaaaaatgagtagtggtatgggttgtataatgttttgaatgtatttaatgctactgaattatgcacttaagaaaaatggaaaatgttatgttgtgcatattttaccaaaatattttttaaattaaggcaatcagggaattgtgaacacaatatgtggtggtattaaaaacttctagcgttagagtaggggtgaagcaagatggctgctatggtttggctgtgttcccacctaaatctcatgttgaattgtgactcccatgattgtcctgtgttttggaaggagccctgtgagaggtgattgaattacgggggcaggactttcccgcactgttcttgtgatagtgaacgagtctgatgagatccgatggttttaaaaacggtagtttccttgcacaagttctcattttgcctgttgccatccacgtaagatgtaactcgctcctccttgccttctgccataattgtgaggcctccccagccatgtggaattgtaagtccaatacacctcttttttttggtaaattacccagtctcaggtatgtttttatcagcagtgtgaaaacggactaatacaatggctaaatagaaaactgcactgattgtcccctttctccacaaggacaccaatttaacatctacctacaaaacaaacaaacaaacaaacaaaaaaaacacctttgtaaaaccaaaaatcagatgagcatgcacagtacctggttttaagttcatatcactgaaagagacagagaagagggtagaaaagacagtcttaaataactgatgccaccactccctcataccatggaagccaccacatgatgcagacagatattctgttcatttgtttgggatagggagagtgcagtaattgtaataaattgcattgaactcagtgctgctgtgttatagcagaaagcaaaacttggttgaacttagctgacttgcacccatggagggaatatttaaaacagtcctagccagaggggaatcaccaatcccagcagtcagaacttgagttccaccaagtttgccaccacaggctaaagtcctctggagccacaaataaacttcaaaggccatctagcccacaagaactgcaactcctaggtgagtgcaagtactgtactggtctcagggttagtggacttgtggggcatgcgacctactgagtcacgagcagggaagctgagaaagtgcttttgccaaccttccaccaactccaggctgcacagctcacagcttcaaaaaagactccttaattctacttgaggagagaaaaaggaagagtaaaaatgacttcgtcttgcatcttagacaccagctcagccacagaaggatagggcaccagtcagggtcgtggggttccctttccaggacctagctcacagataacatttctagaaacactctgggccagaagagaaaccactgtctcgaatggaaaaaatccagttctggcatgaagcatcacatactgactaaagagcccttgagccctgaaaaccagtagtagtaaccaagtaatatgccatgagccttcagtgagactctgagacatgatggcttcagataagacttcacattcccaggtgtggtagctatggggagagactccttctgtttcagaaaagcggaagaaaaagtaaaggagactttgtcttaaaacttaggtagtagcttggacactgtgtggtagaacaccaaagaggatcttaagctctccaaatataagacttggcttttggatgggatttctggacatttccttgtccagagaagagtctagtgacctgaaacgtgagtcccaagacaggtagcaaccaccacaagttgactgaagagcccctgtttcttaagaaaacattggtggtaagctggccatacttgccattggactgtggaggtgatggtcatgggatgaagctcctccccctttggaaagaggaaggaacattgggaaggtctgaatcctgtggtttgattgccagctaaaccataacaaaatagaacaccaagtagactttaaggcctttcactccactctctggctcccagacaaacctctgtatccattcagggtgtatgcgaacttggttccctgaagggaagaacataagccttgctggcttcaccacgtgctgattgtggagcccccaaggccttgagcaaacataggcgccagtctagttgtagttatggtgggccttgggtaaaatctagtactatgctggcttctggtatgactaagcaaagtcacaatggtggtggccacagggctgcttgtgtcaccccaccccaagctccaggcagctcagaacagagagagagaccatttgtttgggataaaataagggaacaggacaatagtttcagcctggtaatcccatgaattctccatatttattaagacattcaaggtagtgtctctaggagtctgaaataaccagagcgttattgggattgaggtgccccataaggcagatgcagcttaggtcacaagaatcaagtcattttgaatacctggaaagccttcccaagaaggacaggtataaacaaacccagactgttaaaaacaaaacaaaacaaaacaaaacaaaacaaaaaaaccctaattattcaatggccagacacagacaaacattcacaagtatcaagataataatgacctcagcaaatgaattaaataaacaccaggaacctatcctggagaaacagagatacatgaactttcacacagagaattcaaaatagctgtgttaaggaaagtcaaataaattcaagataacacaaaaaagaaattcagaattctataagataaatttaataaaaatatgaaaatgatttaaaaaatcaaacagaatttctggtgtcaaaaaataaaattcatatactgaagaatacatcagagtcttttaatagcataattgatcaagcagaaaaaataattagtgagcttgaagaccggctacttgaaaataaacagccagaagagacaaaagaaaaaaataaaataaaacaatgaagcatggctacagaattttaaaaataacctcaaaagagcaaatcaaagagttattggccttgaaaaggaggtaaagaaaaagacaagggtacaaaggttattcaaaattgtaataggaaagaacatcccaaacctagaaaaagatatcaatatccccatacaagaaggttatagaacactaagccaatttaacccaaagacgactacctcaaggcatctaacagtcaaactccccaaggccaacaataaagaaaggcttctaaaagcatcaagagaaaaaaaaaaacaaataatggacaatggagtatctatatgactggcagcagatttttcaggccgggaccttttaggccgggagacaatggcatggcatattaaaagtactctatactaactcgtcatctagcattaggtgtatctcccaatgctatccctacccccccaccacccacaacagtccccagagtgtgatgttccccttcctgtgtccatgtgttctcattgttcaattcccacctatgagtgagaatatgcggtgtttggttttctgttcttgcgatagtttactgagaatgatgatttccaatttcatccacatccctacaaaggacatgaactcatcattttttaccagcatggcacatgtatacatatgtaactaacctgcacattgtgcacatgtaccctaaaacttaaagtataataataaatttaaaaaagagaaaaaaaaagtactctactatagtagtatatctggtgaaagtatttctcaaacatgaaggagaaataaagacattctcagacaaacaaaagctgagggacttcatcaacgccaggactgtcctgcaagaaatgctaaaaggagtacttctatcagaaagaaaaagacattaatgagcaacatgaaaacatctgaaggtagaaaattcactaataatagtacacacaaataaaaaataatatcgtagcactgtaactgtgttgtgtaaactacttttattttaggtagaaagaataagcgatgtgacaattaaaaataatacttaaaacaacttttcaagacatagacaatacagtaaaatataaatagaaacaacacatgttaaaatgtgggaggacaaagttaaagtgtagagtttttattatttttcttctactttgtatatacaaacagtgttaagtgtcatcagctcaatataatgggttataaaatagtatttgcaagtctcatggtaaccaaaaatcaggtgcataaaaattaaaagaaaaaattaaataataatatcagagaaaaccacctgcaattaaaaaaaggcagaagagaaagaaagagaaagtaagaaagaagggaagtccagtaatcaaccagaaatcaaataacaaaatggcaggagtaggtccttacatatcaataataatattgaatgtaaatggactaagctatcaaataaaaaggcatggggatgctgagtgaataaaagcaagaaccaaggatgtgttccctacaagaaacagacttcacctataaagacacacagagactgaaaataaatggaaggaaaagacatattccatgtcaatagtaaccagtaaagaggaggagtagctatacatatatcagacaaagtaggtctcaagataaaaactttgagaaacagagaaggtcactgtataaatataatggggataattaagcaagaaggtataacaattataaatatatatgcactcaacataggagcacaaagatatataaagcaaatattagaattgaagagaaaaatataatctcatacaataatagctggagacttcaacacttcacttttcagcattggacagatcttccaaacagaaaataaacgaagaattttatatgcagtacagaacaaatagacctaaaagatatttacaaattatttcatccaatagctatagaatacacattcttttcctcagtacatggatcattctcaaggatagatcataagatatgccacaaaacaagacttaaaacattcaaaaaaatatcaagtatcatctgtaatcacaaaggaataaaattagaaatcaataaccagagaaattttgaaaactatacatatacatgaaagttaaacaacatgcttgtaaatgaccagtgggtcaatgaagaaattaagaaggaaattaaaaaatttattgaaatgattgataaaggaaacataacataccagaatctgtgggatacagtgaaagtagtactaagagggaaaaatttaaatgaaggaaataacaaaaaggtcagtgaaacaaaaagttgatttttttaaaagataaacaaaattgaggaaagtttatcctgactaactacaaaaatagtaagaagacccaaataataaaatcagagatgaaaaaagagacattaaaactgatactgcagaaattcagaggattattagtggctactatgagcaactatacgccaataaactggaaaatttagaggaaatggataaattcctagacacataccaacgacaaagattgaaccatgaagaaatttaaaatgtgaacagaccaatagcaagtaatgagatggaagctataataaaaagactccaaacaaagaaaagtctgggatccaatggcttctttgctgaattttaccaggcatttaaagaattcaataacaccagcattgccctgatatcaaaaccagaggaagacaaagcgaaaaaagaaaactagaagccaatgaatatccctgatgaatattgaagaaaaaatcctccacaaagtactagcagactggattcaacaatacattagaaaaatcatccatcatgatgaagtgggatttatcctcaggatgcaagtatggttcaacatacagaatctaatcaatgtgatacatcatatagtagaataaaggacagaaaccatatgattatttcaattgatgtattatagaaaaagtatttgataatattcaaaattctttcacaatccaaactctcaaaacacttattataaaaggaacatacctaaacataaatgaaagccatatatgacagacacataagtagtatcatttgaaatgaggaaaaccagaaaacctttcctctactatctgcaacaagacaaggatatccactgtcactactgtttttcaacatggtactagaagacttatttagagcaataagacaagagaaagaaataaagaacatccaaattggagataaagaagtcaaattatccttgtttgcaggtgatatgatcttatatttggaaaaaacctaaagaatccaccacaaaactattccaactgataaattcaggaaattcacagtacacattactaatatacaaaattagtaccatttctacatgacaacagcaaaaaaatctgtgaaagaaatccagaaggtaatgccatttacaacagctacacataaaacaaaatacctaggcattcttttgaccaaataagtgaaagatctctacaataaaaattataaactattgatgctagaaagtgaagaagaaacaaaaatgaaaagatatttcatcttcatggataggataattcaatactttaaaaatgtccataatacccaaagcaatcaacagatacaatacaattcccgtaaaaataccaatgaccttcctaacaaaaatagaataaataatgtaaaaatatatatggagtaacaatgacacagaatagccaaagctatcctaggcaaaaagaacaaaactggaggaatcatggtaactgactctaaattatactacagagctatctatagtaaccaaaacagtatggtactggcatgagaaacagacacatataccaattgaacagaggaaataatccagagataagtccatacatctacagtaaactcatttttgacaaagatgtcaagaacatacattggaaaaggggaagcatctccaataaatggcgctggggaacctggcagtccatatgcagatacttaaactacacgcctgtctctccccatatatcaaaataaaataaaaatggattaaatacttaaatctaagacttcttctatgaaatagattgagaaactctccatgacattggactgggcaaatatttcttgaacaatatcttgtgagaactgacaaccaaaacaaaaatggacaagtggaattacattaagttaaaagtcctctgcacagtaaagagacaacaaagtgaagagacaccccacaggatgggagtaaatatttgcaaaatattcatctgacaaaggattaataattacattatataagaagctcaaacaactctacagaaaaaatacaatccaattttaaaatgaagaaaagatctgaatagatatttctcaaaaaatacatgcaaatattaaatagttatatgccaaggtgctcaatatcattgatcatcagaaaaatgcaaagactacagtgagatattatcttaccccatataaaattactcttatccaaaagtcaggcaataacaaatgcaggtaagaatatggagaaaagggatcccttgtacattgttggtaggaatgcgaattagtacaaccattatggagaacaatttggaagttcctcaaaaggtaaagatagaggtactatatgattcagcaatctcactgctaggtatatactcaaaagaaagaaaatcagtatcaaagagatatctgcagtcccgtgtttatggggacattattaataataaccaagatttggaagccatctaaatgtccatcaacagatgaatcaataaaaattatactatatttacacaatggagtactattcagccacaaaaataattagaacctgtcatttgtaacaacatgaatggaacacgtggttattatgttaagcgaaataagccaggcatagaaaggcaaacttcatactttctcacttattttttcatttatttattttatttatttttccataagttattggggtacaggtggtatttggttatatgaataagttctttagtggtgatttgtgagattttggtgcacgcatcacctgagcagtattccctgcaccatatttgtagtcttttatcccttgcccccctcccactctaccccccaattccccaaagtccattgtatcattcttacacctttgtatcctcatagcttatctcccacatatcagtgagaacatacaatgtttgatcttccattcctgagttacttcacttagaataatagtctccagtctcatccagtcactgcaaatgctgttaattcatacctttttatggctgcgtagtattccattatatatatcacagtttctttatccactcattgattgattggcatttgggttggctccacaattttgcaattgtaaattgtgctcctataaacattcatgtgcaagtatcttttttgaataataacttctttccctttgggtagatacccagtagtcggattgctggatcaaatggtagttgtacttttagttctttaaggaatctccatactgatttctatagtggctgtacttgtttacattcccaccagcagtgtagaagtgttgatcatgatggattatatttttgatatgttgatggaatcagttagcttgtattttgttaaggattttagcatccatgttcatcaaggatatcagtctgtagttttcttttttggttgtgtccttttctggttttggtattagggtgatgctggctttatggaattaattagggaggtttccttctttctctatcttgtggaatagtgtcaaaatacttggtgccaattcttctttgactgtctggtagaattctgctgtgaatctgtctgctcctggacatttttgttggtaatttattaattacaatttcaatctcactgcttgttattggtctatttagggtatcagggtatctaaatcttcctgatttaaggtaggagggttgtattttttccaggaattcatccatctcttctaggttttccagtttatttgtgtaaaggtgttcatactagccttgaatgatcttttgtatttcagtggtgtcaattgtaatatctcctgtttcatttcttaatgaggttacttggattttctctcttcttggttaatcttgctaatggtctatcaattttatttatcttttcaaagaaccagccttttgttttacttatcttttgtattttttgtttgtttgtttctatttcatctagttctgctctgatcttggttatttcctttcttctgctgggtttgggtttggtttgttgttcttgtttttctagttcctttgggtgtgatcttagattgtgctctttcagattttttgatgtaggcctttagggctatgaactttactattagcactgccttcgctgtatcccagaggtttttataggttgtgtcactagtgtcattcagcttgaagaattttttaatttccatcttgatttcatttttgaaattttccatcttgatttcattcagaagcaggttatttaatttccatgtatttgcatggttttggaggttcctttaggagttgatttccagttttattccactgtggtctgagagagtgcctgatgtaatttcaattttcttaaatttattaaggctcattttatggcccatcacatagtctatcttggagaaagttccatgtgctattgaatcatgtgtattctgcagtttttggatgaaatgttatgtatatatatatatatatatctgttaagtccatttgttccaagttatagtttaaatccattgtttctttgttgcctttctttcttgatgacctgtctaatgctgtcagtggagtattgaagtcccccactattattgtgttgctgtctatctcatttcttaagtctattagtaattgttttaaacatttgagatctccagtgttagatgcatatatgtttaggattctgatattttcctgtcggacgggcattttgccattatataatgtccatctttgtctcttttaaatattgttgctttaaagtttgttttatctgatataagaatagctccccccgctcacttttggtgtccatttgcatgaaatgcctttttctacctctttaagtttatgtgagttcttatgtgttagataagtctcctgaaggcagcagatatttggttcatgagttcttatccattctgcacttctgtgtcttttaagtggagcatttaggccatttacattcaatgttagtattgaaatgtgaggtaccattgcgttaatcatgctctttgttgcctgtgtacttttattcgttttttttttttttttctttttaacttgtatttttgttttataggtcctgtgtgatttatgctttaaagaggttctggtttgatgggtttccaggatttgtttcaagatttagagctccttttcacaattcttgtagtggtggcttggtaatggcaaattctcagatcatttgtttgtctgaaaatgactgtatctttccttcatgtatgatgcttagattcactggatacaaaattcttggctgataattgttttgcttgaggcggttgaagatagggcccaatcccttctagcttgtagagtttctgctgagatatctgctgttaatctaataggttaccctttataggttacctggtgcttctgtctcacagctcttaagattctttcctttgtcttaactttggataacctgaggaaaatgtgtgtagttgaagatcttttagcaatgaatttcccaggtgttctttgtgcttcttgtatttgcatgtctaggtctctagcaaggccaggcaagttttccttgattattcccccaaatatgttttccaagcttttagaattgtctacttcttcaggtacattgtttattcttaggtttggtcatttaacacaatcccagacttcttggaggcttagttcatattttcttattcttttttctttgtctttgttggattgagttaattcaaagaccttgtcttcaagttctgaatttctttcttctatttattcaattctattgctgagactttccagagcattttccatttctaaaagtatgtctgcagtttcccaaattttttattgttttttctttaaactacctgtttccttgaatatctctcccttcatttcttgtatccttttttttggatttctttgcattgggctttgcctttctcttgtccttccctgattagcttaataactaacctcctgaattctttttcaggtaaatcatgaatttcttcttggtttggatccatggctggtgaactagtgtgatttttggggggtgttgaagagccttgttttgtcatattactagggttggttttctggttttttctcatttgggtgggctctgtcagagggaaggtctaggactgaaggctattgttcagaatttttgtctcacagagtgttcccttgatgtagtactctcccccttttccagtggatgtggcttcctgtgagccaagctgcagtgattgttgtctctcttctgggtctagccacccagcaagtctacccagctccgggctggtactgggggttgtctgcacagagtcctgtgatgtgaaccatctatgggtctctcagctatggataccagttcctgttctggtggaggtggcagagggtgcaatggactccatgagggtccttagctttggtagtttaatgctctatttttgtgctggttggcctcctgtcagtaggtggggttttccagaaagcatcagttgtagtagtgtggacagggactggtggtgggcagggccctagaactcccaagattaaatgccttttttcttttgctaccagggtggatagggaaggaccatcaggtgggggcaggctaggcatgtctgagctcaagactctccttgggtgggtcttgctatggctgctgtaggggatggggatgagattccaagttcactggagttgtgtacctaggaggattatgactgcctcttctgagtcatgctggttgtcagggaagtgggggaaagctggcagtaacaggcctcatccagctcccaggcaaactgaagggctggtctcactctcactgtgcttctcccaacagccctgagtctgtttccagacggagggtgagatgggcttaaaaatttgcctgaggtttttctgcctctcagctgtgaaggaaaagggctttagctcttccccatgtctgtgaagtctgcatgttggattcccaccctccttcgagttctggccaggaggcttctcgccctgttcaaattattacacagttcagctagagaattttttctccctttggagttttacccctgctcctctggccatcctcctgatggatccctgtggtgtcaggcaggaatggactgcttgaagacccagcgagctcccagggcctttctgctgcttcttctacccctgtatttcactcggcttggctctgcaacttgacttagctccagataaagtcagaaacttctcctgcaaataggccttcagcttttccagtgcgggggtgtgtttgggagaggagggtctccctttcccacttccgcagttggggcactcgcagtatttggggtttctcctgggtcctgcaggagcagtctgcttacttcagaggatcctcccaggattgctggtttgtttttggagttgatctggaattaaacttcacaatgcaagcctccacatgcaactctgtctagtgctgcaatctagtcctgcctcccatctgccaggatccctcagtaataccctcacttatttttgagagctaaaaatcaaaacaattgaactcatgcagatagagagtagaaggatggttaccagatgctgggaagtgtagtgggagatgagggaggaagtggggatcggtatttggtataaaaacatagaaagaataaataagatagtatttgtcaggacaacagggtgacttagtaaaaaataatttatttgtacattttaaaaataactaaaagagtaaaattggattgtttgtaacataaaaaataaatggttgaggtgattaatacctcatttatcctgatttgattattacacattgtatgcctgtatcaaaatatctcatgtaccacatgagtattaacttacctggtccctaaaaaataaaagataaattaaaaatataattttaggtgtataataatactatgttttcaaaaataatatgtattatttcaaggtatatatttaagtatttgcggataggataaaaaatgaagaagggcaattgatgaatcagcactggccatatattgataaaaattgggtggtggctatacatataaaggctaatcatatctttctatctttgtatatatttgaaattttctatactaatgaatttagtagaaatcctctgggtagtacaaaatagattttcattttctccagtgggttgcatctttttaaagactattttaaaaagcctctaatggtgacacagattcccacatagctccaatagtttaatttgtctctattttccactccattctttcctccaccacagggtcctggctgtattttaacattcccctgcaatgtcaaggtctggaattctgtagggcaagaaggctcttcatagtcctcttttagataagatttggttcttctatgttctctgaagaaaagcatgtagaagacaacccacctcttctattgatcttatttatttcctatcatattgttgcttttctgtattattttgttagaccacttctcatatatgtgcacagacaggaaggaaagatatacacgaatggaacatgaaacactcatttttaaaggtagaaaattatagacacccaggggagtgagtcagattatctggacccaaatcccagtaccatgaattactagcttcatgactttggcacatttttctgtactataaaatggaattaataaaagtatctgcctaatatgataataggatacattgtacatagtatcccatattatatagtatcccaagataatgaaataatgcatgtaaagcacatggcctatattaaacactcaaaacatagtagctattattactatatcttcactggcattgtatcttgctatttatcaattgacaggtgaaaaactttctactgtaatttgtatctcgtcaattattggattattatttatttgtctgatttttcttctgtgtatttttcattccaatcatttattcaattttgctgatcaagtagtgtttttcttgttgaataagtaaccactgaacaaaataagaaagtagtgaggctgttttttatttttatttagtttttttatttagtttttattttatttttatttttttagcagaaagtgcaagattgacctcaatttattcaaattcagaatttgtaagatgggtccaatgctgagatggggaaagacccagaatcaagccttaagaaacttcaacatattttttcagtcttgactatcagagttatgctagagttgaaaaatgaacgggaaggtgcagccttttcagaaacaggctagcagttcctggaaaagttaaacataaagctaccatatgacccagcaattccattcctagtatctacctaagggaaataaaaacatatatccacaacaaaacttgtacaaaaattttcatggcagcattatacatagtatcccacaagtggaaacaacacaaatttccatcagttgattattggaaaaaacaaaatgtggtatatgtataaaatatatcaccctgcttttatgtttctaaataatcttttcattaaacttttttcagttaaaccctttgagtatgccatttactttttctttggacactgattgttagagtgggttaagagttttgcacaattgtctttataatttaaacaattttttttatttctggttaaatcgtatttcttatccctaaaacttatattgtatctattattgttaaatattaatatcattaataacttactcaattcctttaatatatataagcctattcagattatgtaatttttttggtgtgagacatggcagattgtgtctttcaagaactttgtccatttcatgaagattatcaactttgtgtgcatagagctgtttaagatattcctttcaaaaataaattctttctttctttctttctttctttctttctttctttctttctttctttctttctttctttctttctttctctctctctctctccctctctctttctttctttctttctttctttctttctttctttctttctttctttctctttcttttttcgacagagcctcacttcatcaccctggctggagtgcagtggtgcaatctcagctcactacaacccctcttcccaggtccaagggattcttttgcctcagcaacctgaatagctgggattataggtgtatgccaccactcctggctaatttttcttgtgtttttagtaaaggcagggtttcaccatatgggccagactggtcttgaactcccaagttcaagggatcctcccacctcagcctcccaatgtactgggattacaggtgtgagctaccgcccctggtcacctttataatatatatttttctaccaaaaaacacatgtactcatatgtttattgcagcactattcacaataacaaagacatgaaatcaacccagatccccatcaacagtgaactggataaagaaactgtagtaaggggagacctggggagaaccaagaaaagacattgagtttgaggcggtgctgagataggatcatgaaggaagaggtgaagggaattcttataagagtggcgctgtgttgttgccctctggtccccaaagagattatcgagggctgctgccagatatgcctttccttcgtgcccagggagcctcaggtagtggttggtactgataaatccttgaactatgattttgtgtttgaccccagtagtgaacaggaagaagtcttcaatacagcagtagcaccactcataaaaggcatatttaaatgatataatgcaacggtcctggcctatgggcagacttgctctggaaaaacacatattcaatgggaggtgcatacactgcagagaaagagaaggaatcaacagttggggttattcctagggtaatacaactgctcttcaaagaaattgataaaaagagtgacttggaatttactctgaacatgtcttacttaaagatttacagtgaagaaattttggatcttctatgcccttcttgtgagaaagctcaaataaatatatgggaagatcctaaggttattgatttctaattttattcctttgtgattacagatgatacttcatattattttatttttttttaatgttttaagccttgttttgtggcataccttatgatctatccttgagaatgatccatgtactcaggaaaagaatgtgtattctatagcataaagattgtgatactcactgagcagactgttttagttgccttggatactgtttcctatttggagcagcgcaacaactttaggactgtggcctccacagctatgaacccccagtcatcccaatctcatgccatctttacaatctccatagagcagagaaagaaaagtgacaagaatagcagctttcgctccaagctacatcttgtagacctcgctggatcagaaagagagaagaaaaccaaggctgaaggggatcatctaaaagagggtattaatattaaccgaggccttctatgcttgggaaatgtaatcagtgctcttggagaagacaaaaagggtgactttgtgtcctacggagattccaagttggctcgactgcttcaaggttctctaagtggtaataaccatactcttataataggctgtgtgagtcctgctggctccaatctagaggaaactaaatacccttcgctatgctgacagagcaagaaaaaccaggaacaaacctgttgttaatactgatcgccagatagttgaacttaatcatctaaagcaacaggtacaacagctacaagtctggttcctacaagcccatggaggtaccctgcctggatctataaatgtgtaaccatcagaaaatctacaatccctgatggagaataaaaaattaaaagtcgtggtctgagtgaggcagctggtcagacagcccaaatgttagagaggatcattttgacagagcaagtgaatgaaaaaaatgaacgctgctgggcgcggtggcccacgcctgtaatcccagcactttgggaggccaaggcgggcggatcacgaggtcaggagattgagaccatcctgcctaacacggtgaaacccctctctactaaaaatacaaaaaattagccgggcgtggtggtggcaggcgcctgtagtcccagctactcgggaggctgaagcaggagaatggcgtgaatctgggaggctgagcttgcaatgagcccagatcgcgccactgcactccagcctgggcgacagagcgagacaacgtctcaaaaaaaaaaaaaaaaaaaaaaaaaaattaacaccaagctagaagagctaaggcagcatgcagccagaaaactggatcttcaaaagctagtggaggcttaggaagaccagaaatggaaagaaaatgtagagatccactgctctcttcagagccaggaggcaggaacgtttaagtctgctgaagttgcacccacagccccccctttcccccaggtgctctgtcccagggaaatgggagttttgtctataagcccctgactgggaatgctgcctttctttcagagatgccctgcccagagaggaggaacctagagaggcagtctggctacagtggctttgctgagctgtgttgggctccaccctgttcaaacctcccagcggctttgtttacactgtgaagggaaaaccacctactcaagcctcagtaatggtggaggctcctccctccaccaagctcgagcatcctaggttgacttcaggctgctgtgctggcggtgagaatttcaagccagtggatcttagcttgctgggctctgtggggtgggatctactgagctagaccacttggctccctggcttcagcctgtttccaggggagtgaatggttctgcctttctggtattccaagtgtcactggggtatgaaaaacaaaacaaaacaaaacaaaaaacctcctgcagctagctcggtgcctgcccaaatgactgcttagttttgtgcttgcaacccagggccctggaggtgtaggcaccggagagaatctcctggtctgagggttgtaaagactgtgggaaaagcatagtatgtgcgctggaatgcactcttcctcatagcacagttcctcacggcttcccttcgctagggaagggagttccccaaccccttgtgcttcccatgtgaggcaacactccaccctgcttctgcttgccctccatgggctgcacctactgcctaaccagtcccaattagatgagccaggtacctcagatgaaaatgcagaaatcagccgccttctgcattgatcttgctgggagctgcagactggagctgttcctatttggccatcttgccagccacccaatgaattatttttaaatgttatgtaagtaaataaaccttagcccacctacaaaaaaaaaaaaagaaagaaagaaactgtagtatgtatcaccatggaatattacacagccataaaacagaatgaaatcatgtttttttgcagaaacgcagatgtagttggaagtcattatcctaagaaaattaatgcaggaaaagaaaactgaattctacatgttctcacgtaaaagtgggagctaaacattgagtacacgtagataaacagttgggaacaatagacactggggactactagatgacagagggattgggatgcctgagaatttttttaaaaactacctactgggtactatgctcactatctgggtgatgggatcattaataccccaaacctcagggtcatgcaatatactcttgtaactaacttgcacatgtaccccttgaacctaaaatgaaagttgaaaaaaaattgcttagtatcattttaatctccataggatttatagtgatgtctgcttttcattttagatattagtaattagtgttttctgttttcctttttttcccaaattctaaagtctttttaatcttctgatatttaaactttttcaagagtgcccattagtttttcttttagggtagttttgtttgatatgactggaggttgtaattaatggtatgccaaattttccattctttgcagagataggtaatgcaccaaaattgtcttagctatttcttggtcgccagtttgagagacaaacactgttatttttaacagcccaaactcctctcagccccaatatcctgacatctttagtgagttaggataatcctaacctagaggtatatatgcctgtgagattcctggcctgaaaggaataaatcatttcacagcattcataggacagaaaaataaaaactagggctcctacagtaaacaagtattatttctgttcaaaaccatcctgcaagcccaaaaatcagctggccctagagtttcataacaggtacacaggtcacaggcagacaggcggggcaggaacaggaatttctctgggtgcatgctactttggttctgcctcagaggcactagaagtctaggccctgcattagcactctctttttctttcttaattagcctggctagaggtttttcatttgtattaatcttttcaaagaaccaccttttgatctgtttattttccctattgatttcctgtttctgaatgcattgatttttgctttaatttgtattatttcattttttctgctcactgataatgtcccttgctcttaagtctgctctgcctgaaattaataaagccattcccactttcatttttttaaaaccaccttattaaggtatgattgacatattaaaagctttacacatttaatatatacatatttataaattgggactaggtgtatacctgtgtaacgatcaccaccatcaacactctaaacatatacatcatctaccaaagtttccgcctgtcccgtttgttattaataccttttttcttgttttttaatgttaagaacatttaatataagatctatttcttttagcaattttaagtgtacaatagagtattgttagatatggtccctatgctatatagtagatctccagaaccaatttattatgcataactgaaattttgaccctcaaactatcacctttccatttctcccttacctcagtctttagtaaccaccattctattctctgtttctgtgagtttgactaatttacataccacaaataagtaaaagaatacagtttttttttctgtgtctagtttattttacttaacgtaatgccttctaggtccattcattttgcaacaaatgacagaatttgcttcttttttaaggtcgaatattattcatatatatattatgtcacaatttcttatttatttgtccattgatgggcatttacatgtttctcatatcttggctattgtaaataatgctgcagtgaacataggagtgcacatacttctttgaaattgtggtttaaattattttggatatgtacacccagaagtgggattgctagatcatatagtatttctagttctaatttgttgagaaacctgcatactgtttttgataattgatgtatatatttacattttcaccaagagtgtacaagttttctcctttctccacacctgcagaataatttatcctttggcattttataatagccattcaaacagatgtgaggtaataccttattgtggttttgatttgtatttcctgggttattagtgatattgagcaactattcatatacttgggcatttgtatgttttctttggaagaatgtctacttaggtcctttgcccattattaaaattgggtgtactttagctgttccacggtatgagtttcttggatattttggatattaaccccttatcagatgcatggtttgcaaatattttctcccattccataggttgcctttttattttgttgtttcttagctctgcagaagctttttagtttgatgtattcccacttgtttatttttacatctcttgcttttgctttttatgtcatatacgaaaattattatcaaaatcactttctaggaatttttccactttttttttctaggacttttacagattcatgccttattgttgggtcacgaattcattatgcattgattttgtgtatagggaagataagagtcaaattttacctgctttcatgtagataaccagtatttccaacaccatttattgaagtgaccattctttgcccacttgtattctttgcatccttgtcaaaagttagctgactttatatgtgaggatttatttcagggttcttcattctgttctattggtctacatgtctgttttatgccagtgccagtactgttttaattactataaatacgtaatataattgaaatcaagaagtctgttgtctttactttgttctacttactcaaaattgctttgcttacagggtcttttctggtttcatataaatttttggataatttattctatttctgtggaaaaggccactggaattttgatagggattgacttgaatctgttgattgctttgtgtagtatgaacattttagcaattttacctcttcaattccataacataaaaatatatttcaatttatttgtgtctactttattgtctttcaattgttttgtagttttcagtgtacacctttttcattttctttattaaatttatatctaactatttttatcttttttgatgatattttagatgagattttaggtaagattgtttccctatttttttctgataagctgttattatatagaaatgtaacagatatgagattttagataagattgtttccctatatttttttctgataaagtgttagtatatagaaatgtaacagataattgtaactgattatgtgtcctgaaacattactgagttgatgtattagttctgacacttttttgagaagtttttagggttttcaaaatgtaatatctcattatatgcaaataagacagttttacttttttccattcctatatgtaagactttttttgttacctaattacactggctaggacttctagtattatgttaattagaagtggtgaagtgagaatccttgccttgttcgtgatcttagaggaacagtcttcaatttttcatattgtctgtattagctgcaggtgggtaatatatggcctttattatgttgaggtacatttcttatatacttaattgtttgagagattttaccatgaaaggatgttgagctcacaaatttttttctacatctattgagatgatcatatgatttttattttttattctgtttatgtagtgtattgttgtgggacttctccttagttcagctaaagacggggtccttgtcacaaggccacaaaagattaggctcataggcaatttgaagggtgaataaggcagggttttattgggtgaaaagggaagtaaagggaaacaggtaccctctgcaaaggagagtccctgctggtcagcttcctgccttgcagtttaatcccaagttccacacaggaacaggaggggcgaggcttctccccgcttcaaagaatgaaaacttctgtgtctccaccccagtgtgccctcctcccaatgcacaggccagccggaattttgtcagggagcttcctgacctgtctgtctcagtatcatatttattatttgcatgtgttaaacattcttgcctccaaggtataaattcactttttcaaggtatataatgcttataaagtcctgctgaagtcagtttgtagtattttgttgaggattttcttatctatgtacatcaggaatagtggattgtaattttcttcttatagtgtctgcttttggtatcagggtaaagttggcctcatagaatgaatttgaaagggttacatcctctcaaagttttagaagagttttagaatttcaaaaattcttaaagtttggatagaattccccagtgaattcatctagctctaaacttttttgccaggagatttttgataactgatttaatctcctttcatgttatctgtctattcagattttctatgtcttcgtggttcaggcatgctagattttatgtctaggattcatccacttctaggttatccaatttgttgatatgtaattgttcatagtagtctcatgatccttcatatttctctggtatcagttgtaatgcttcctctttcatttataaatttatttgtttatatcttttctctccctttttactctagctaaaattctattgctttatctttttaaaaaacaagtcttaattttgtgaatattttctattgttttttctggtctttatttaatttgcttgttttatctttattatttccttatgcttactgtgtgtacttgttgctcttttttttatttcctggcattgtaaagtgatttttttttaatttcagattttgctattttcttaatgtagccatttattactgaaaacttcctgctgataactccttttgctgcatcccataagcttggtatgttgtattttcattttaacttgtcccaatgttaccagatagtgcctcatagttccaagctcttggcgtctcaaacaaacaattggataagatatacacagatagcaaagcaaagcagcaaaaatttattaggcacaatattacactctcagagggggagaacagactgacctctgtagattagatcagccttagtttggtgtactttgggtctttttatgtgttttctttttcctctctccccaagggctgactagccagtgtctgcctttttgactgataggtgtgttgcttagttatttaacccctgtgtgcttgcacattgcctccatcccataagtttaagtacacgcatgatatgaagtccataggtgtgagctttaatgagctgattattacacagggtcatgctaaggatatttttaatgcacatgactatccctgaagagttgccccttacttgtttggtctggatactattggccatgggatccttgctcgctgctttatcttactttttgttttggctgcttaacttctgcctcttaccttgcttcttgctcacctgccccttcaccttgcttctgccctctgcttttacttcttctgccctttatccaacttttaattcccttcactattctcctgcctcattttccctattctcctgcttcaccaagatattattttattacacttgaaatttttatttaactcattggttgtttgttagtatgttgcttaatttacacatatttgcgagtttcccagttttccttttgttattgatttctaatttcatatcattgtggttagaaatgatacttgatatgattttaacatttttacatttgttagcacttgtattgtggcctaacatatggtctaatctggaaaatgttccatatatacttgggaaggatttgtattctgctactgttggacagaagggtctgtatatatctgttagatccatcattttatactgatgttcaaattctctgtttccttattgatttacttttgagtgatctatccattattgaaagggggtattaaagtcccctacagtaattgtattgctatgtatttctcccttcagttctgttaatatttgctttatatatttagttgctccaatattgaatgcatttatagttacaattgtaatattctgtttatgacttgacccctttatctttgtataatgacattcttgttttcttctgacagtttttgacataaatctattttgtcttttataaatatagtcacccctgctctcttttggttgcaattttcatgggatattgtattttatcccatcacttttagcctatgtgtgtcattaaagctaaagtgagtttcttgtagacaacacatggttgaatcttgcctttgtttttcttttatccattcagccaatgtacatgtattgattggataatttaaccaatttacacttaaggtcattgttgatacataggacttattaataccattttgttaattttttactgactgttttgcagtgctttgtttccttcttcatctgctgttttaacttctgatttgtagtggcatgctttgattcctttatcttttttttttctttttttattttttgagatggagtctcgctctgtcgcccaggctggagtgcagtggtgccatcttggctcactgcaagctctgcctcctgggttcacgccattctcctgtctcagcctcccgagtagctgggactacaggcgcccgccaccacgcccaactaatttttttttatttttagtagagacggggtttcaccatgtatccaggatggtctcgatctcctaacctcgtgatccacctgcctcagcctcccaaagttctgggattacaggcttgagccaccgcgcccaacctatctttttcttttgtgaatcaaatataggtattttgtttgtgattaacatgagacttgcataaagcatcttatggttatgacgttctgttttaacctgatggcatgttaattttgtttacaaaaattagtacttttgtcacccttcccaatattttgttattgatgtggaactttctaccactttattgtttatacattaataacttattgtagctttggctctttttgatacttttgccttttaacttttatactgtttaaagtgatttatataccaccattacagtattagagtaatctacatttgactacatacttacctttaccagcaagttttatatgttcctatgttttctgtcaattaatatttttaattttcatttttattatattttatattttaattttcaaattttaattcatatgagtacatagtgggtatatatatatatatatgtatgtatgtatgtatgtatagaatatatgggatattttgctacaggcatacaatgtctaacaatcacatcagggtaaacaaggtttccattacctcaagcatttatcctttgtgttacaaacaattcaattatatacttttagttattttgaaatgtacaattgaattactgttgactcaaatcatcccatcgtactataaaatactagatcttcttcattcttttcaactatttttgtaccatttaaccatacctccttccccatgtcagccgctccactacttttctcagtctctggtaaccaggaagtggcaaaaatggaacccttatatacactgctgataggaacataaattagtacaaacactgtgtagaacaatttggagatttctcaaaaaactaaaaagagaactaccatatgattcagcagtaccactgttgggtatatacccaaaagaaaaatcggtatatcaaagagatatctgcacttccatgtttgttgcagcactgttaacaatagccaagatttggaagcaacttaaatgtccatcaaaagataaattagtaaagaaaatgtggtgcttacacaaaatggagtgctcttcatgtgggatggttaatgagtataaaaaaaaattagaaagaataaataagacctggtgtttgataccacaacagggtgactatagtcaataataaattaaaggtatattttaaaataactgaaggagtataattggattgattgtaacacaaagaataaatgcttgagggtatttatatcccattttccatgatgtgattattatgcactgcatgcctgtaccaaaacctctcatgtgcccactaaatatatacacctactgtgtatccataaaaatataaatataaatgaacaaataaataaaacattaaaaaataaaaaagagctaccgtatgatccagcaataccactgttaggtatagacccaaaagaaaggaaatcagtttatcaaagagatagccacactcccatgtttatggcagcacttctcacaatagtcatttggaagcagcctaagtctccatcaacagctgaatggataaagaaatgtggtatatatacacaacggagtactattcaaccataaaaaagaatgagatcttggagatgatgtcatttgcagcaacttggatgaaactggaggtcattatactaagtgaaataggcccagcacggaaagataacattcacatgttcttatttatttgtgggagctaaaaattaaagcaattgaatccatttttattttagtttcaggggttacatgtgtaggattgttaaaagcatatactgtttgatgctgaggtttaggcttctactgatcctgttacacagctagtaagcataaatagcatatttttcagcccttgctcccctccttctcttcttttggagtctgcagtgtctattttccccaggtttatgcccatgtgtacccaagatttagctctcacttataaataagaacatgtaatatgtgatttttttttgtttctgtatttatttgcttagaataatggactccagctacacccacgttactgcaaaagacatgatgtcatctggttttatggctgcatagtatttcgtggtgtaagcaaaccatattttatttatccaattctctgttggtgggcatctaggttaatcctatgtcattgctattgtgaatagtactgcaatgaacatagaagttaatgtgtcttttcattagaatgattttttttcctttgcatatatacacagtaatgagattggggggatcaatggtgattctatttttagttcgttgagaaatatcccaactgctctccctagtggctgaactaatttacattctcaccaacagtgtgtaagttttcccttttctttgcagcctcaccagcatctgctattttttgaatttttaataatggccattctgactagtgtgagatagtatctcattgtggtttggatttgcgtttctccaatgattagtgatgttgagcatttttatatatgtgttggctgcttgtatgtcttcttttgagaagtgtctgttcatgtctttgtgaacttctttctttttttattagagtttttttcctgttgatttaagtaccctacatattctgaatattagtcctttgttagatatatagtttgcaaatattttctctcattctgtaggttgtctgctcactctgttcctttgccgtacaaaagctctttaggttgattaggtctcacttgtcaatttttgtttttgttggaattgctttttaggacttggtcataaattatttcccaaggctgaggtccagaagaatattttctagctcctcttctatgatttttatagcttgaagttttctgtttaagtccttaattcatcttgagttcattattgtatatggtgatatgtaggggtccagtttcattcttctgcgtattatatcttcatatgtttacatgttgctgattagcatcacttttttcaacttgaatatctctctttagattttttttttttgtattgtaggtctagtggtctgaattccctcagcttctgtctttattgttcttttatttctgaagggtagatttgccaggcataatattgttatttgggaggtgttcctttcagcaatttgaatatatcatttcactttctccttgtctgcaagatttctagtgacaaataaactgatagccttgtggaggtttttttgtatgtgacaagttgcttttctcttgcagcattcgagttctgtgttttattttgataattcgattatactgtttctcagtgaagaccatttcatgctcaaactacttcaagtttgttgatgttcatagacttggatattctttcttccttctggattttggaagttttgtcattacttattaagatttctgttccttttttttctctgatcattctgagacgtgtgtgtgtgtgtgtgtgtgtgtgtgtgtgtgtgtgagatagtttctcttaagttcagcaggcttcattcacacctttttattctttttgttgctgttgttccagggacagtctgtattttctgggttatttatattccttgaagatttgcattgctgtcttctatctgaataagtagtcacattctccagtctttactgactggctttgggacagaagatccttcaccaggaagcccttctaggaatttagggggactttcagaaatttatatacatttccttgctccacttctcttgttctctctttgggaagcagtcttgcaattgtatgctttttcttgaccccacaaatccaggcctggtgctgagaacctctattatacgttttcctatggcagtgccctgaagtgtttgaggctgtggagccttctctgaaaccagcaaagttgagccagctgctaagatctgcatctgtttttcaaacttgtgtgccttctctgagagcttgtgcatgctgtttacagggatgtgaagggtgccaacaatgggtgaaggggtgctggggcatgtgccaggtagttggaatgtcttcaagtgagttgttctgtaggcttcttgagtgggtatcttggtagagtctatgaaccatttagcagaatcactggctagctgttgagaaatatgcactggttactgtgtgctccctccctttccctctgcttcaagcttcccctgatgatttggcagtgtcaatcccataagtgttctgggctgcatggggtgagacaacagtaggcctcctgggccgcctcctacaagactgtgaaagctggatgctcactttaattttccttccttctgtgggagaaatcataggcgcaggggatctctcagcaccaaattgtgttgcctttggataggggtgatgcaagtaaagtgaaacttctctttttaccttcttcaatgcatctactcttggggattttgtccactagagtgctggaacctcagctatactccagggatttcacgaaatattcttacctgtgagtctttaccaaaattgttgtttctatggaaactcctattccgctatattgctgatgtcactccttactttcactttctttcaattagtgctaccattgttttcatattcaaagcagttttcctgtagagaacatacttgggttttcttttattacaaactctgataatctctggcttttaattggtgcatttagaacactgatgttccaaattataattggtataggtgtattaatgtctacattatctgttactattttctatttctttacctttgatcttttaatttttctattatactttttatgccttctgtggttttcattgagcattttatatgatttcattttttctcctttctcagcatattagtcacactttttttacactttttaaagtggttgccctagtatttgcaaaaatacatttacaactactctaagttcacttttaaataacactatactactcatgggtagtatgggttccttataataacaaaaataacctgattcctccattccattttttgtataattgttgttattcatttcacttatacgtaagtatacatgcatatgtacatcatatatatgtaaaaacaaatacataatgacatatattgttcctcttattattttaaataaactatctgttagatcagttaagaataagaaatatattggactcaggcagaccctaaaaataagaaaaataagtttttattttaccctcatttatcctttatctggtgcccttttattcttttcatttctgacatttatttttctctataaagaatttttaacatttcttgcaaaacaggtctactggcaggaaacctccttaatgcttgttcttttgggttagtctttgtttctccttcacttttgaaagatgattttgctagatacagaattataggttagtagttcttttctctcaacactttaaatatgtaactgcattctcctcttacttgcatgatttctgaggacaagtgtgatgtaatttttatctttagtgtaaggaaggttttttcccatctaactcttttcaggaatttttctttatctctgatttttgtggtttgagtatagcatgcctaggtttgaattctttttgttttctttttcttttttttactatatcctacttggtattttctcagcttccaggatctgtggtttagtgtttgacattaatttgcagaaaattctcagtcttcattgtttcaaatattacttctgtttcttcctctacttctaatacagccattacacaaacgttatacctcttgtagttatcccacagttcttgaatattttgttctgttttggtttttctttttttctttttttctcttatgtttttgaagtttctattgagataggctcaaatattcttggcttagctgtgtgcaattccctagtaagcacattgaggcattcttcatttgttttagttttttaaatctctaacattactttttgcttctttcttataatttcatttctaattataatgtccttctattcttgcatgctgtctactttacccattagagcctttagcatactggtcataatatatttaaatttcttacctgaccattccaacatccttgccataactgaatctaattctgacacttgatgtgtctcttcaaactgtatttttttcttttagtatgatttgtaattattttctttttttattatactttaagttcttgggtacatgtatgtgaagaacatgcaggtttgttatatagttatacacgtgccatggtggtttgctgcacccatcatcccgtcatctacattaggtatttctcctaatgctatccctcccctagacccccaccccctgaaaggccccattgtatgatgttcccctccctgtgtccacatgttctaattgttgaactcccacttatgagtgagaacatacggtgtttggtttttcattcctgtgttagtttgctgagaatcatgttttccagcttcatccatgtccctgaaaaggacatgaactcatcctttttatggctgcatagtactccatggtgtataagtgccagattttctttatccagtctatcattgatgggcttttgggttggttccaagttcttttcttgatatccagtcatgatgtcctgggtaaaaagaactgctctaaataggtctttagcaatatggtaatatagtgtgtataggggtgagaaatagttctacagttttacgattaggtctcagatttttagtgagcttgtacctctggattgtgaacattgcaagtgcttctcagtatactgctaccacacttatgatgactattgtggtctacattaaacattttttcttttccaacatggaagagagggctggagttgcatcttttcctttccccaggtttgttagactctgataaaaccccagcaggttagtttctcctgaggaaagagctttttaataaaaagaaaattcacgtatgtatttcaaaatggttcctttcttcctggaaccatgaggataattttctttgatattcactgtgaggtctggtataataaatccaggaagtaaaactcacaaaaatgtgggagcttcctgatgactgggcttacctggagtttttatctcaaacactagtccacattgagcccaaacaattcatcatttacagtttaagttttcttaccctggcacttgtttccacagacgttcctgctttgatttcttttatgtatttttctgtctgtctctccagtttggggagcagtggttttccctgtgacctcacttcttatggatctacaaagagttgttgagttttctgatttttcagtttacttgttcttagggcctaatgatgacctccaagcatcttaaaacactggactgtaaacctgtctttaactctcctttaaaatattaatttatacaattaatacttacagataaagctgaaattttttggataaatgcacccactactaatttctgtccactgcctcctccctcgtccttttagatattttcccatgtgctcttcacacatttctatgtatatgtagaaaatatagactatatacagggaatttaaaaataaatgttattatactggatatttttctgcaatgtcttcttcattctacaatatatgttggagatatttatactaagatctatctcattaaatctacatattagggatctatactttactgaaccttatttttaactgccatttataattcatagttcatataatagactatttagccaattcactatatagtatcacagtggttaagaacactagctctgtcatcggattatcagactctaatcttgggaacttggaacaaattacttaatattcctgtgactcatttttataaataaaatgcaaataataatactttcttcatatgattgatgtggagggtaaatatagtagaacatgtaaagcctttagaataatacctgccacatttgaatcatgcagtaagtgtcaaatattagtatttataagcatctgctttgttctagtttttcactcctacaaacaatgctccaataagcattcagtgtagtattctttgaccatgtatataagtggtttccagagataaaaccaagtagaaaaattactgagtcacaaatagtgcctatatttcaccttgtttaatttgtatctccttgagtactaaagagattgagcattgtttcatggttttatttaccagatatatttcctcttacatttttgtgacttgtattttcttattctttattcatttttcttacatatatgtagaaaattttttaaaatgtggatgtctcatcagttatatacattataaatgtcttcctccagtcaacatgttgttgagaaatatggtttttaaaaaactttgatatagggaaatatataattattacatttttcctagttgatttttacttttttttgcttaaggaatttgtcctatattctaaggttgtatcatatttttcaaaatttatttttcttgcattatttttacttttatggacacagggtcttactctgtctcccaggctggagttcagtggcacaatcacggcttactgcagccttgatctcctaggctcaagctctcctcctgccttggcctccaattaagctggaattacaggtgtgagtcactgagcctggctatacttacttttttttacattatgttaccaatgcccctgcaagaatgctttgctaagggtgtaagcttagaatcttagaatcaaactttacgtttcagatagagtactcagagtttgtctttatagtggccaaaatcaaccttagactaaatgatgctctgttcccaagcccccaaaaaagtgtaaaaattacagtagagatagggaggaagatggcatataagagacagggctaatgtgcagctcttacttggatggacagaacaacatgtggagactcacaccatgaacttttgcttcaagaactacttcaggaatgtaacaggaaaaccaaaagaattcacagattctttgagagaagtggcatgccactgcaaatttcatgagacaggcaaaaaactaatttggggggcaaacaagaactgctgtatatacaaacacagaagctgccactgacagtgtgggcagagagggaggagcaaggcctgataattgtgcttgctttcccagtggagaagtgtacagcctggggtaacttctgagcagggcactgtgggagcaagaccggcctcaccagctgtgtgggagctgagtgaagcctcttgctacaggctataccccacttttctgatgaaatatatggcacagtagagacagccataatcccctctgaaatataaccccattggcccaagaaccacaccccatcccccacagtggctgccactagccctgcacaaggagagtgtgagcccagacccacctaaacctgcccccacgtgacgatatttctctacccaccctagtatccaaacacaaaagacagaaactcttgggagctttatggccctgcccatcacctgcttagaaccccctactactactgcagctggtgctctcttgaaaacaccacttcctgccaaccaactcaggccattacagcaactcatgacaaaatgacccagctacaaggaaggataaaacaacaactaatttcaccgcctgcaacatttaggctaaccagaggtcctgactctgtccaagtgacaacttcactgcttgcataaccagcatttgagaaagccagcacactaagcatatctacaaccaaagactctcacagagcctacttcatcccactgccacctccaccagaatagatgctggtatccacagctgggagactttaagtgaatcacatcacaggactctttgcagacattccccagcagcagcccagagcctggtagcccagctgggtggctggagccagaagagcaataactatcactgcagttcagctctcaggaagccccatccctaagggaaagaggagagcaccacatcaagggatcaccctgtgggacaaaagaatctgaacagcaggccttgagttccagattttccactgaaatagtctactcaagtaaaaaggaaccagaaaagtaattctggtaatatgacaaaacagggttatacaacaactacagaagatcacattagctccccagcaatgaatcaaaaccaagaagaaatttctgaattgtcagataaagaattcagaaagttgattattaagccactccaggagataccagagaaaggtgaaaaccaacttgaatgaatttaaaaaacaatacaggatatggatgaaaaattatccagagaaacagatatcacaacgcagaaacaatcataatttttggaaatgaaaaatacgcttagagaaacacaaaatgcactagaaagtgtcagcaatagactaaaacaagtagaagaaaaaacttcaaggctcgaagacaaggtttttgaattaacccaatcagacaaagacaaatttaaaaaattgagtaaatgaacaaaagccaccaagaaatttgaaattatgttaaatggccaaacctaaaaataattggtattcccaagaataaagagaaatctaaaagtttggaaaacttatttgaggaaacaactggaaagcttccccagccttgctagagatctagacattcaaatacaagaagcttaagaaaacaactgggaaattcatcaaaaaaagattatcatgtaggcacataggaatcaggttgtctaaagtcaagacacaggaaaaaaatcttaagagctatggaacaaaagcatcagttaatctataaagaaaaacctatttctaagcagaaaccttacaaggcagaatgtattggggtcccatctttagcctcctgaaacaaaataattgtcagccacaaatttttttttatccagcaaaactaagcttcataaatgaaggagagttaaaaattccttttcagacaaacaaatactgagataattcaccactaccaagccaacactacaagaagtagtaagaggagttccaaattttggaagaaaacctcaaaatacaccaaaatagaacctccttaaagcataaacatcacaaggcctataaaacaataacacaatggggaaaaagattttaaggaagcaactagcatgattaattgaacagtacctcaaatctcaatactaacattaaacgtaaatgatctaaatgctccacttagaagatgcagaatggcagaatggataaaaatccaccaaccaagtatcttctgctttcaagagactcacctgacacatgaggattcatataaacttaaggtaaagggtggaaaaaatattccacgcaaatggaaaccaaagcaagcaagagtagctagtcttataccagtcaaaacagacttcagagcaacagcagttaaaaaaaaaagaaagacaaagtgggtcattatataattttaaaaggattagtccaacaggaaaatgtcacaatcctaaatatatattaacctaacactggagctcacaaatttataaaaccatcactactacacctaagaactgagctagatggcaacataaaaatagtgcagaacttcaatactccactggcagcactagacaggtcttcaagacagaaagtcgacaaagaaaaaatggacttaaactataccttgtaacaaatgtacttaacagatatttacagaccccaacaacaacacaatatacattcttttgcttgacacatggaacattctccaagataggagaccatgtgaccatgtgataggtcacaaaacaagtcccaataaatttaataggattggaagtatatcaagtatcctctcagaccacagtgaaataaaagtagaatttaaccccaaaaggagccctcaaaactatacaaatacggggaatttaaataatctgctcttgaatgatctttgcgacaataacgaaatcaagatggaaattaaaaaaagatttgaactgaatgataatagtgacacaatctatgaaaatctctgggatatagcaaaagatgtgctaagaggaaaattcatagcattaaatgcctacattaaaaagtctgaaagagcagctgggcgtggtgtctcacgcctgtaattccagcactttgggaggccaaggcgggcagatcacaaggtcaggagatcaagaccatccttgctaacatggtgaaaccccatctctactaaaaatataaaaaaaattagcaaggcatggtggcgggcacctgttgtcccagctactcaggaggctgaggcaggagaatggagtgaatctgggaggcagagcttgcagtgagccaagatagcaccactgcactccagcctgggcaacagagtgagaatcagttaaaaaaaaaaaaaagtctgaaagagcacaaatagacaatctaagctcacacctcaaggaactagagaaacacaaataaaccatacccaaatcaagcagaataaaaggaataacataaatcagagcagaactaaatgaaattgaaacaaaaaataatgcaaaaaagaaaggaaaaactggtgttttgaaaagataaacaaaagtgatagaccattagattaaccaagaaaagagagaagatccaaataagctcaactagaaaaaaaatgggagatattataactgatatgacagaagtacaaaagatcattcaaggttactgtgagcacctttacatgcacaaactagaaaatctggaggagatggataaattcctggaaatatacagtcttcctagattaaatcaggaagaaatagaaactctgaatagaccaacgaaaagtagtgagattgaaactgtaattttaaaattgccaacaagaacaacaaaagtccaggaccagatgaaatcacagctgaattctatcagattttcaaaggaaaattgatactaatgttactgaaactatttcaaaggtagagaaagagagaatctcccataaatcattgtatgaagccagtatcactccaataccaaaaatcaggaaaggacataagagaaaaagaaaactacagaacaatatccctgatgaacatagatgcaaaaatcctcaacaaaatactagctaactgaatccaacagcatatcaaaaagataatccagaatgattaagtgggtttcataccagtgattcagggatgctttaccacatgcaagtcaataaatgtgatacatcatataaacagcattaaaaacaaacatagtatgaccatataaatagttgcataaaaaacagttgacaaaatacagcatcgccttatgattaaaaccctcaggaatattggcatagaaaagatatatctcaagataataaagccatctatgacaaacacacaggcagcattatactgaacagggaagatttgaaagcattcttcctcagaatggaacaagacaaggatgcccacttccaccacttttattcaatatagtactggaagtcttagtcagagcaagagaaagaaataaagggcattcaaataggtaaagaggaagtcaacgtgtcgctgtccactaatgatacgaccatatacttagaaaaccctaaagactcatccaaaaagctcctagatctgattaatgaattcagtaaagttttcggatacaaaatcaatgtacacaaatcagtagcactgatatacaccaacagcgaccaagctgagaatcaaatcaagaacacaatcccttttacaacagctgcaaaaatataaaatacttaaccaatgaggtgaaatatctctacaagaaaaactgcaaaacactcctgcaagaaattatcaatgccacaaacaaatggaaacacattacatgctcatggatgggtagaatgaatattgtggaaattaccatatggccaaaagcaatctacagattcaatgcaattcacatctaagtaccatcatcattcttcacagatcttgaaataaacaattctaaaatttatatggagccaaaaaaagaccctgcatagacaaatcaagactaagcaaaaagaacaaatctgggggcatcaaattatcctacttcaaaccataacacaaggctatagtcaacaaaacagcatggtactggtataaaaataggaaagtaggccaatagaacagaatagagaacccagaaataaagccaaatactgtcaactgatatttcacaaagtatacaaaaacatacagtggggaaaggacccctgttcaacaaaaggtgctggggataattggcaagccacatgtagaagaatgaaactggattctcacctctcaccttatagaaaaatcaactcaagatggaacaaagacatgaaactataaaaattctgtaagataacatcagaaaaacttttagacattggcttaggcagagagtttatgaccaacagccctaaagcaaatgcaacaaaagtaaaaataaatagatgggactgaattaaactaaaaaacttctgcacagcagaaggaataatcagcagggttaacaggtaacccacagaatgagagaaaatatttgcaaattatgcatccaacaaaggactaatatccagaatctaaaaggagctcaaacaaatgtacagggaaaaaataaataaataattaaaattgggtaaagaacatgaatagacaattctgtaaagaagatatacaaatggccaacaaacatatgaaaaatgctcaacatcaataattatcagggagatgcaaattaaaaccacagtgagatgtcatcttatttctgcaagaatggccataattaaaaaatgaaaaaaataatggatgttgttatggatgttgtgaaaagggaacacatttacactgctgcttggaatataaactagtacaacctctatgggaaacagtatggagattccttaaaaaactaaaagtagaactacccttggattcagcaatcccactaatggctatatgcccagaggaaaagaagtcattatatgaaaaagacacttgcactcgcatgtttatagcagcacaattcgcaattgcaaaaatatggaaccagcctaatgcccatcaaccaacgaacggataaagataatttggtatatatatggaatactactctgccataaaaaggaacaaaatagtggcatttgcagcaatctggatggagttggagaccattattctaagtgaaataactcaggaatagaaaaccaaatatcatatgttctcacttataagtgggagctaagcaatgaggacacaaaggcataagaatgatataatggactttgaggactcaggggaaagggtgggagtagggtgaaggataaaagactatacactgggtatcgtgtacactacttgggtgaaaggtgcactaaaatctcagaaatcaccactaaagaacttatccatgtaaccaaaaaccacctgttgcccgaaaactattgaaatacaatacaattttaaaaataaaaattaaagttggaaaacaataaaacaacaacaacaacaaaggaatctaaccttactttccaaatgtacagaaaatttttccaaaaatattcattaattagctcatcattccccgacatcacatgcttcttttgtgttatgcttatattagttactaatgccatattataatgtagacatgcatacacatgcataaatatatctatatgtgtatatatatatgtgtgtatgtatatgtaagagtgtgtgtgtgtgtatatatatatatatatataaaatctggactctctattcctttccaagtcccaaacattttgttttaattacaaaacttcagcaataaatatttatagaacaagacaaatttctttgtaatcttatttcaaaattattttggctatttataaataccattctatgcagattttaaaattaatttgacatgtttcataaaacatcctactcggttattatattggttttaatagtttggcagtcaattcttctggattttctgcatagaaaaagatttcaattagtacttcattgaatagtagcattaatccccctcttgttcttgattttaatggctacgatcctaaaatctcatcagagatactttcagactatcattactcatctcataaaaactctttttctttgggtgctcattgactctgaatttactctccagtctttgttgtcaaaatttacttacctagtcactcctactcctccatcatttattgaaaaacttgacacctgcttcatttagttttctatctcaggtactttcgttattctcagttacatcaatattcatgcgagcaacacatccaatgcactggcctcttggttcttgattttctcatcaccatcacctttacttcctctccacttcagtcatctactctcatgatcacattttcaaccttaccgtcctggactttgagatatcaaataaattatcctgaactttcgaatataaaagtcaaattttgttaataatttcctattttttctagttcaatggaatggaagagacttaactccctctttctatctaaggattttttttttttatttttttttgagacggagtcttgctctgtcacctaggctggagtgcagtggcacgatctcggctctctgcaagctccacctcccgggttcatgccattctcctgcctcagcctcccaagtagctgggactacaggtgtccaccaccatgcccacctaatttcttgtattttttttaggagagacggggtttcaccgtgttaggcaggatggtcttgatctcgtgacctcatgatccccgtctcggcctcccaaagtgctgggattatgggattacaggcgtgagccactgcgcctggtcttttttttttttttttaggtggagtcttgctctgccgcccaatgcagtggtgcgatctgcaacctccgcctcccgggttcaagcgattctcctgtcttagcctcccgcgtagctgggattacaggcgcccaccaccattccccgctaattgttctatttttagtagaggcagcatttcaccgtgttgcccaggctggtctcgaactcctgacctcaggtgatctgcccgtcttggcctcccaaagtgcggggattacaggcataagccaccgtacctggccaggattatctttttagttgtgcttttttattctttttcctaccacttcctcaaaaacctagctccactaatgtcctcatgtctcttgtatcttaaacctgtgcctctctaatggtccctttctgccaatttatttaaacatattcaagttttctcttatactcttccaagtgggttgctatgatatgaatgctcccccaaaattcatgtgttgaaatgtaattagaaatgcaatagtattaagaggtggggcctttaggggttgattacatagtgctggcagagccctcatgaatgggattagcaaatttatgaaagagcttgagtagtgtctgtgctccttccattccttctgccatgtaagaacacagcattcttcccctccagatgatgcagcaacaagactccttcttggaagtgaaaatctggccttaacccaacctgccgacaccttggacttggactttccagcctcccaaactgtaatataaacataaatttctgttttcttctgaattatccaggctggtaattttacagaagcacaaatggacatggattaaataagatgtaacacttttggtttatatattctattagtccatttttgcactgctataaagaaatacctgagactgagtaatttataaaggaaagaggtttaattgactcccagttttgcatgggtagagaagcctcaggaaacttacaatcacggcagaaggcaaagggaaagcaggcaacttcttcacaatgcagcaggacagagaagtgcgagcaggggaaatgccagatgcttataataccatcagatctcctgagaactcactcgctatcatgggaacagcatgggagaaactgctgcaataattaagtcacttccccacagtccctggggattacaggtccttcccttgacacgtggggattacaatttgagatgagatttgggtgggacacaaatccaaaccatatcatatatagagcttatactccccatgaggaaaattggcatgttcttttgataaaagagtgtttggctttgacaatatgcaccatcaaaaatattgggaatatacatgagaacgtattataaggacagaccatggaggaaggaatataaaaattgattaagccaagttaaataatgtgcatgcattcatttagattttaagatgaaatatgttggtatgagcaccaaagaatggtgataactctctgcgagattggttaaattgaaacttgtatatagcagtggtttatagttagtgaaatgccaaaacttccctgttacattatatggaaaggattctgaagacagtgagatgcaactgttgaaatggacatattgtgttcaactttttatcatatccctctccacaacattgagaacaatgagtactaaactggtcaagcctaggcacaaggtgaaagcaattgacatattaaatgaaacaaagggtcaaagcaacgtattttgtctttcaagagtttatgataatggctaactaatcaggacattgttaggcataaattaagcgatctattaagttgctgtttggcacatttagacagaaaactttgaagtctattgtacagaaacctaacttgagtgaccacagtggggtttgcagccttgtactcagtttccatgcccaagaatgtccacagaattggagacccttgcttgagggaggttggatgccttttatgaataacccagaaatggagacacagttgcatacatttagtattcccccaatctttgtccagaggaatccaaatccatttatctggatgactggatgaagaagaaatgtccatttttgaagctattagacattagccctgagctggtactgaatcttggacacctggaattccaccatagtttataaatcagagtgtggggctatcaacatcagaagataaaataagtcatagcccaagtctatctccctgaggcggaatttagactgcagattaatgttatattttattcccaattttcaaaatgtgtagtgggaaaatacatattcagcaactggaagaatccccatactggtttcatgatccatgagttagggctattgcaagagtcactacaactctccttactccctgccaagactgtaaaccaaaagagaaaggaattgcagaggttattactatcatcagatgcctccacaatccaaaaagtgttattttttctatattgccatttaatttaatttggctaggggcaaaggccagatgtgttttggaaaatgactatggattattgcaatcgtaattagagcataaagcaaattccagctttagttctgaatgtggtgtctttattaaagcaagtaaacactgctcttggcagttaatatgtagctatttacataacacataacttcttcctcttccatttctgtcagcaaaaaaaaaaagaagaagaagtagtctgccttaccttcctatattagggagacataattttgtcttctctcttacaatttggccaaaagtaacacgaattatgtttgtatccccaacaaaacatcatactgttctattgtatttatgacattatgctaagtagaattgatgagcagaaagaaacaagcattattagtgccttagtaagatacatgcatatttagaagtcctgtcataagtttgatgttttccaggagtccagtggtctgggcctgtcagtatattctttctaaggtgagaaacattcattgtctcttgtgctgtctgtcgtgaaaaaagagataaaatgcttggtagaacttctgggatgttggaggcaacacataccacacttaggtttgctgctccaactcatttaccaggtaacccataaggctgtaagtcttgggtttggtctagaggaagaaaacacttacagtagatctaggcaccagtgcaagttgctctgccatttgtgccttataaaccatcagacacaatagcattggaagtttctacaaaagacaaaaatgctctaggataattatagcaccaactcttaagcttacgtagtaaagtcatgctctcttcttatgataactatttccaaattgaaatactattcccatctttctaacaggcccagtagagactaaattccttgaccatgggacacaaactgacatgcaacctaaactgcatggcataaaattagtgataacatgtattggatccttaaaacataacatgaggaatgatatcctaaaaagattcaaatattatttcagttgagagacagcaacctgtaagattgaggtgctacccttcaggctaaactttaaagcagcagtcaattttgtcctttcccccataaagagaggtgagagtgtcccttttatattattattattattattattatataataatattatatctatctaacaatgctctgaagaaacttttgcttcctgttccctgaatcttgattttagtgccttatgcggctcggatttgtgtccttgaccaaatctcacgtctaattggtggaggggcctgttgggaagtgattggatcatgggagcggatttccccctgctgttctcatgatagagagtgagttctcatgagatctgatggtttaaaagtgtgtggcacttccccgctcactctgactctcttctgctctgccatagtaagatatgttatcttccacttcacttttcaaaatgaggcctcacagccatgcatcctgttaagcctgtggaactgttagtccattaaaactcttttcttcataaattacccagtctcaggtacttctttatagcagtatgaaaatgaaccaatacagaaaattggtaccagaagagtgggggcattgctacaaagatacctaaatatgtggaggcaactttggaactgggtaatggtcagaagttggaacagtttggtgggctcagaagataggaagatgtgggaaagtttggaacttcctagagacttcttgaatggttgttaccaaaatgctgatagcgatattgacaatgaagtccaggctgaggcagtctcagaaagagatgaggaacttattgggaactggaataaaggtcactcttgctatactttagcaaagagactggcagcattttgcctctgccctagagatctgtagaactttgaatttgagagagatgatttaggatgtcagacagaataaatttctaagcagcaaagcattcaaaatatgacctggctgtttctaaaagtgtacacttatatgcttgaagaaagagatggtctgaaattggaatttatgtttaaaaggtaagcagagcataagaatttggaaaatttgcagcctgactatgtgataaaaaagaaaaacccattttctggggagaaattcaagctggctgcagaaatttgcataagtaaagaggagctgaatgttaatagccaagacaatgaggaaaatgtctccagggcatgtcagagaccttgatggcagtccctcccatcacagtctcagagacctagcagggaaaatggcttcatggactgggcccagggacccttgctctgtgcagcctcagacatggtgctctgcattccagctgctccagctccagctgtggctagaagtggccaaggtacagctcaggtctttacttcagagggtgcaagctacaagccttagtggcttccatgtagtgttgagcctgcaggtgtgcagaagacaagagttgtgcattggaaatctttgcctagatttcagaggatgtatggaaatgcctggatgtccaggcagaagtctgctgcaggggcgtagcactcatggagaacctctactagggcattgcagaggagaaatatggggctggatgccccacacagagtaccccctgcagcactgcctagtgggactgtgagaagagggccactgtcctacagactccagaatggtagattcaccaacagcttgcaacgtgagcctggaaaagtcacaggcactcaatgccatcccatgaaaactgccatgggggctgcaccctgaagagccacaggggtggagatgctcatgtcatagggagcctaacccttgcttcagcatgtcctatatgtgagacatggagtcaaaggagattattttggagttttaagacttaatcactgccctgctgggtttcagaattgcatgggacctgtaacccctttgttttggccaatttctcccttttagaatgggagcatttacacaatgaatgtatccccattgtatcttggaagtaactaacttgctttgaattttacaggctcataggtggaaaggacttgccttgtctcagataagactttggacttagacttttgagttaatactggaattagttaagactttgggggattgttgggaaagcatgattggttttgaaaggtgcaaaggatatgagatttgcgaggggccaggagtggaatgctatggtttggatttgtttccctgaccaaatctcatgtctaattggaggaggggcctggtgggaggtgattggattatgggggcagataatccccttgttgttttcatgatggtgaatgtgttctcttgagatctgatggtttaaaggtgtgtggcacttcctctctctctctctttctctctcttccccactctcctgctctgccatggtaagatgtgctagctttctctttgccttctgctatgattgtaagcttcttgaggcctccaagccatgctttctgttaagcctgcagaactgtgagccaattaagcctattttctttataaattacccagtatcaggtatttctttatagcagtgcaataacagattaatacagtgggtgtgcaagtcctactgctcaggggtggagtacttccaccagaaaatggagtcatggttccattaaattggatcctgagactgattcttagccatctgtggctctccacaaaccaacaggcagagaaataattgctgtacttgctgaggtgattaattataattatcaagggaaaattgtgctgctactaaacagtggaaccaaggaaaactattactggaactcaaaagattcactcaggtgccttgtctccttcctggccgaatggccattttcaatgaaaaactgctacaaatacaagattgccaacaactcaaaccctgcagtgaaaaatatctgaattattccactaggtaaaacaaaacccatccagccaagatgctgcagatggcataggaagataaggaacgggttgtgtaagaagaagattatgatgaccaacttctgaccccttaacagctagaaatcaagaactgaagcagccatgctttacttgacttctttttccctcttcccactcaagttgccttatataaagagtaatggtggtggctaacattttagttttaggtagaaatgtagaattgacaatatcttgaaattggatggtagctaatgagaatttatgtgttctctatgctggggacatgaatactttatctggataaacaaaaagagtggatgctgtggagaaaagtaaagtgggctatgctggatactctcagtcaggttctccggagccactcttcattcatcttttctgcttgtatcaagggggctgtcctttgtggattgcatcaaggcactcctattcttctggcttctagttgagtttggtcaatgggagacaccaacaggagattaaaggacaaagtggttgtgtccctctaccaaagactgcagctcctgtcagggaaagtcttcacctatagctagttttcccccttgcctcttcaagggtagaggtcatgaggcctcaccagtgttgttaaacctagtgagcttcattgggacttattatttattaactcattttacactttatactttgtcactttattaacctctcttcattgttctgtttgagggtgacatctgtttactgctgaaactctgaatggcacatcaaacatcaatttcccactgtttaacccaagtaaattttgagatctgcaggagcaagtcatattatttttcatccaaggatgtaagccagacacctgggactcatcaatgacaaaactccttgatatacttcttcttaaatatgcaatttataattattttccatcacttttatgccaaaaatatatctttatttcctctacttctttattttatcattgacactttccttgtccaatccattatcattttttgcttagactactggaatggcctaattggtcttactgttttcccttttgtctccctgtaatatattttttctcattgcagtcaaagtaatcttttaaaaataccaatcggctctcattcatgaccctacttaaaacccttcaaatgtctcttattactttaagtacaaagacaaaagttttttgtttgtgtgtttttacatagcctatagtgtcctacatgatctggactctccctaattttccaacttattttcatataattctctttactcaatgtgctcaggccctttttatttcactttctccaacaaccacattccttcctgcctcagggacttagcttccaatgacttctgcctgaaatttacctgatttatactactcatacttcagctttctgctcaaatttcacagtaagttgagacttaattattagtccaggattctcacccctgccattataaactctcataggcttctataattcttctttataataaagtagctgaattatttgaaaaagccttttactccccaggagactatatgcttaataggggcagggtctatgtctgttttgctcagaactctatccattcccattcctgacaaacaataaatgagagaatgaataatcatgtgagggtgagtgaatggatagaatagaaacgtggcacaagttatgatacctaaaactatgattcacacaattcttagatctatgactgcccacttttcttttttttttgagttttctttttttttaattattattatacttttaagttttagggtacatgtgcacaatgtgcaggttagttacatatgtatacatgtgccatgctggtgtgctgcacccattaactcgtcatttagcattaggtatatctcctaaacctatccctcccccctccccccaccccacagcagtccccagagtgtgatgttccccttcctgtgtccatgtgttctcattgttcaattcccacctatgagtgagaatatgcgttgtttggttttttgacagatttggggctctgagtttctggaaaaacaatcagagagctagtctctgtcagatatctattactcatggatgccagcatcaggttatcattcagttatacttttagcatttttaaaggtttttctcttttaagaaatattcattagtagtaaaaatttaggagatgctgcatttggagggctgttacccttatgctattttatacgatggccactaggacttttttgtttgtttgttttcatttagccagatttgggggcaaaattggatatacaatgtatctcgttgcatggagcttctgttaggatactgttcttttacacactagaatctctttcttggcatcataattttctatcttgtgtgaaagttacctttaaaactattgtgaatttggctgtggtttaatagttgttcatgtaagacatcctgtctccaattactcttttttcatttttttctttagtgattctaacttatttatgcttccagatgaaacttcaaataattttgccaagttccaaaaccaattattttgggattttaattgaaattgcttaaaacaagaaatttaattgtggaagaatttgtctatttgtaatgttcttcctctcttctctatttacttaacttttattttatatctcttaattaagtttcatggctttctttataataattccataaatttcttgttggtgctacttgatgtccctgttgctattgtgagaatattttttacctggtggtatttccctttaattggttgtttgtggtataaaggaaagtaattggcttttgtttctatcatactgaatcttctcattaatttttaaagttttgattattccactaatatcttatatgtaaaaatctatctagtaataaacataattttaaccctcctttaaaagttatatttttatttgttttacatattattgcattggccagaatgtctggaacaacactgaatagcttcaatagccaacatcctttcctgtgttgtaccattagttgtgatgttatttaagataaatttggaaatagtgtatttcctttttcctaaatttctatgcatattttaagacaagcaatgggtgttaaattttatcagactctttttacatattcttctttatgaagagccagttcttgaatttatcaattactgttattatcttctaaatactgcattttgctttctgtatgctttattgtttgtgccatcgctttatttctaagttcttaaagttaaatgtttaatttatttcattaaaaaataatggtagtatttaagggtatggattcgactaagtagttttggctactgaaattgaccaatagttggtatcccagcaggtaataagggatatcaggagcgatttttcacctaatacaagggaaatagtttatagtactcatgtccccttggtatgaagtttagactcttagatacatgagtaatgatcacagcatttgaagttcttaaaagctatcaacatcttatccaaggttagtccttagtgatccattatagctgtgtatagttgtttaatttgatgagaaagaaaacacttcaaaagattttaaagtgctatgcgcctgaagcctctaaataaatagttgaatttacatgataagccaattatgggatgtttataaaagagtaattaatatactgtcaaaagggagtgaaatatgaaaatataacatataaatatgtgtaggtgggaatgggggcaaagttggcctcataattttagatctgttacaggtacaccaaaagctaaataagtaatattaattattcacattgactatatctcaagtgatgaaataaaagaaacagtggttgtatagagtaaaatttattatagggttgtagaattcatacaacctaaactccttacagcattcagcacctacacaattttgtgcattccacaatacagatagtagtgagaaagaatcactgcattagttaaaaatgactgtctcatgaaaattgttcacatataagtcaggttaattacagagcacctaacagaactgcaaagatgtaatttctaaattcaagaaagttgtacaaaatgaaaaacaaaagaaaccaacaatgttgagatctgatatattttacacaaaaagttcaaaaacaatttaaaatatttcaaattttaaaattgctccaccataagatgaataaagagcttacttaaaggaaaagaaaaaacaaacaaacaaaaaaaacaacggatggaatttattgtcaggatgttaggtgatatattcatgctgctttcagaaatctaaaccctataaattcaaagaaaaaatgaaactcatgtaatttcagtttcaaaaaacaagcaatgccaattaaactaaaatttgacaagagcttgcagtggttagtagtttttttttttcctttttttaaagcataagcaatagagtaaatgcatgagtaaatatcttgagtatcccataaaccttaatgttaaagtcatattgtaaatctctgacttcttattaccaaggacactctatctgttgcctcttactcttgacagatcttggtctcaacaataaattcgttggggaagtgtctaatcttccagcatttatcaatggcacgtttgttgaaacctgtaaggaaatgtgcaaaaaaagtggcttttgaaatttttgtggaaatgaaaatatatccagacttgttccccactttttcctgtattctacctccactttcttccactgtgtaacacagggtgaaggaaggaatacattagttacttacccagcaagaggtctctgcgacgaaggcggaaggactttctgttattgcaaagttggtaaataaagatgccaaggttactaacatcacgaatttcctccacagcaactaggtcttctcgaaccacataagtttgaggcagatatctgccactctaaaaatcaaaagcaaagattgaaatgagaaattctttttcctttttaactttgaagttcaggagtaaaagtgcaagtttgttacttaagtaaagttgtgtcatggggtttgttgtagagattatttaatcacccaggtattaagcctagtacctactggttatttttcctgatcctgtcccttcccccatcttccaccctctgaaaggccccagtgtgtgttattcccctctatgtgaccatgtgttctttgcatttggctctcacttaagtgagaacatacggtatttggttttctgttgctgtgttagtttgtaaggataatggcctccagctttatccatgtctctgcaaaggacatgatcttgttttttttttgtgatttttttttttttttggctgcatactataccatggtgtgtatgtatcgcattttctttatccactctatcattgatggacatttaggctgataccatgtctttgctattataaatattgctgcaatgaacatacttgtgcatgtgtctttataataaaattatttatatttctttgggcatacacccagtaatgcgattgctgggtctaatagtatttctgtctaggtctgagaaatcaccacagcatcttccataatggctgaactaatttacaccaacaccaatggtgtataagcattcctttttctccacaacctcaccagcatctgttattttttgactttttagtaatagccactctgactggtgtgagatggtatctcattgtgattttgatttgcatttatctaatgttcagtgatgctcagcttttgttcatgtttgtggcccgcatgtatgtcttcttttggaaaatgtctgttcatgtcatttgcccaaattcttaaggacactatttaaatcctttcctacaccagataatgactgtaaaaaataatctttattttctagagcagttttaggttcacaacgttttttatttcaaaattatttcaataaaataaaatgttttggacaaattcattatttttttaaaaaacaaggaagtaaaattacttggaaatgcttatataaaaatttgacttccaaaatacataccgccagtttgccaaagagctctaccagattttttggaggcataacaatagaagtattgaggggcatcagatagcagttccccagcaacaagtccaggtaagcagtcattccctgttaggtaggggaaaaaagtcaggtaagacacagaaggcattaacattgcgaattttccaactaccattagattaagcggctacatcctttcaaaatcaactaatgtgtattcaacaacaaaagaatgaaaaggctttgcctcaaaaacatgtgcattcatgaatgaatttaatacctgccaatgaagtaaaaaagagagagagagagaaaaaaaatcctggaatatttataagaatgagaagcccaccttttcaaagtcatgaataattgctgcagggtcactatcagagaaactggggacaggcacatcaatgattgcaatgttgtcatcctcacgaatgtcagcctcctcagtcacaggcaggaagttaggctctcctccacgaagggaatttgcaggatcctcagaatcaaaaaagcacatctctccacggtaaatggtgctctaaaagacaaaaagggaaaattacaaccttctaataatcactatcatgatatttgaatggcttttcacactcatatcaattcattgtactatgtgttaagccgaggcttgttgactacagttatcacaatgaagacaaatcaattttatgaactgaaaggcaacttgaaaactttccctaaatcttcttttctctagtcaccactacagaattttttaagttgctactaaatgtctagcaagtagtaatccaaagtataataattataattattattattaccttgggcatgaagtacttgtaaatgcaggctccaccaacaataagtcctgccaagatgaatgaaaggcctaagagagtaagcatacatctcccagaggagccctctttttcctgggtggcaactcggagctcctatttattaaaaagcaaaaccaaaaacaaaaccagattgtacttttagacacatagttgattttgtgtacaatttacctcccttgaaacccaagatatttttttaaatgttaactcattttaattgtagtctgaatttatttcaagacaatttctgaatctaatagatgttaaaaaatgtctctgattatattaaccttccatttggcatttctaaacccaaatatcgatatgaaattatttcaaaatacatgcatcaagaatcaaattaaaattaccatttatttatgcaatgtcatattcttttttactgtgctaagaacacttaacacgacattgactcttaacacatttttaaatgtataatatagtattaacaataggcacaatgcagtagagccgatctctagaaattatactcagtaaacagaagtaattactttttgaactagtacactgatataatcactaactttctgggatatggttctgtttcttcattattttttccaaatcagtttgtcaacttaaaagagaattagtatcctttgattaatttattaactgatttttcaaaaagctgatttttgaaaattaggttttaaaggtaggagttctataaggtatatgccattttccccatattttagaaattaaaatattgaagggagagatataaatttaatgttcctaatttaatcgagaaataaaagtttcttaatatcgatcaatattctataactgtgtattgcatgaatgaaatattttccacgtcctgggtgaaacacttgattttgaagtgtagcatttgcgatagctagacacaaaagttgtctgtgtggtaacagtgactgtaatattttgttaaatcaatattttgcttcgggattgaaacaagaaagatccaaagcaaacaagcaactgattgtgcccttcccagggcagtggactccaatctttctaatcccatttttgtatgtcacaatacatcctaagcagcattgttactcaaggactgaataaatgaagtaagcaaatctaggccctgatcattaaagagtaaatcattcaaacgtgtatataaatcgaattgttttagtcttttaggtcattagctctttttcaggacaactactgcaatgtttatcagagctaactaaccttaaattcatttggtgaaaacaaatgcatagatttcaagttaatgcagaagatgaaaggacaatcatttgttaaatgtttatttttccaaaaatatttttctttgaaggtcaaagaaatttgagattcccattttcttaactaaatttatttaagttcaaaccctccactaattagtactctataaaccttgaaggcttttctgtgtcccagtaattttcaggaacttttaattatttttattaaaaaaaaaaacctaaactaagattagcactacaaagatagaactataaattttgatttggaattactgtacaataatctagaactggagacttaaaattatattttagatgactaaaatgagtttcataaagataaagtaacttgctcataagtcacataatagcttaatttgaaattctaagagaaataaatttattttttcttgctactgagacatgagaagaacagtttgcactgtaatttcatttattctttcaataattcaggaagtttattaagcaaggcctaagtattagaatttcaatttcataagatgttacatcctagaaataaggattttttgttttcatttacatttattggactttaggttggtgtgagccatcaattaccatagctaatttctcttggaactctttcgaagtgattgtacactatgtctgacatcatatttgtcatgctcaacctctaatgagctagctgatcaatgtattacaacacaatatgtcaaatattattatcagtgtcctatagtggccaggtaaggatcctgttaagttttctccaaaacgtaacagcaaagtataatcaaagtgcaaatgctcagttttgcttattcctcatcgcacccacaatcctggcagaagtattgcttgcatattaactgaatctatctacaagtcatgaaatgcttggcggtgaagaaaaaaaaaaaaaggattactgtgtggctatatttaactactggcctctaattagacctcccaaaaaatctgaccatgtttaacctacaaactaagcaggagaacaattacatatttgacctctgtcatttaatcaaaacctcaacaatgcaagagggtgttacttttgagctctaaaatgtataacacacaaaagctagttttactgcaggatttaatattgaaagtttccataataaaaagctggataagcacattaacatttcaaattgtgtgtacaatcaacttttactacatggattctcatttaactcaaaggactttttatatctccactttgaacacagaagttaaaactatatagagaacaagacaagtcaggacagatctgcaagcgccaacactttccagatttcatagaacacgaagacaatactattgccctttaaaattgagattatactgaggagtagtatacgaaccctg

SEQ ID NO: 597 - protein, 328 aa, Homo sapiens
MGFWILAILTILMYSTAAKFSKQSWGLENEALIVRCPRQGKPSYTVDWYYSQTNKSIPTQERNRVFASGQLLKFLPAAVADSGIYTCIVRSPTFNRTGYANVTIYKKQSDCNVPDYLMYSTVSGSEKNSKIYCPTIDLYNWTAPLEWFKNCQALQGSRYRAHKSFLVIDNVMTEDAGDYTCKFIHNENGANYSVTATRSFTVKDEQGFSLFPVIGAPAQNEIKEVEIGKNANLTCSACFGKGTQFLAAVLWQLNGTKITDFGEPRIQQEEGQNQSFSNGLACLDMVLRIADVKEEDLLLQYDCLALNLHGLRRHTVRLSRKNPSKECF

SEQ ID NO: 598 - DNA, 2542 bp, Homo sapiens
gaggagggacctacaaagactggaaactattcttagctccgtcactgactccaagttcatcccctctgtctttcagtttggttgagatataggctactcttcccaactcagtcttgaagagtatcaccaactgcctcatgtgtggtgaccttcactgtcgtatgccagtgactcatctggagtaatctcaacaacgagttaccaatacttgctcttgattgataaacagaatggggttttggatcttagcaattctcacaattctcatgtattccacagcagcaaagtttagtaaacaatcatggggcctggaaaatgaggctttaattgtaagatgtcctagacaaggaaaacctagttacaccgtggattggtattactcacaaacaaacaaaagtattcccactcaggaaagaaatcgtgtgtttgcctcaggccaacttctgaagtttctaccagctgcagttgctgattctggtatttatacctgtattgtcagaagtcccacattcaataggactggatatgcgaatgtcaccatatataaaaaacaatcagattgcaatgttccagattatttgatgtattcaacagtatctggatcagaaaaaaattccaaaatttattgtcctaccattgacctctacaactggacagcacctcttgagtggtttaagaattgtcaggctcttcaaggatcaaggtacagggcgcacaagtcatttttggtcattgataatgtgatgactgaggacgcaggtgattacacctgtaaatttatacacaatgaaaatggagccaattatagtgtgacggcgaccaggtccttcacggtcaaggatgagcaaggcttttctctgtttccagtaatcggagcccctgcacaaaatgaaataaaggaagtggaaattggaaaaaacgcaaacctaacttgctctgcttgttttggaaaaggcactcagttcttggctgccgtcctgtggcagcttaatggaacaaaaattacagactttggtgaaccaagaattcaacaagaggaagggcaaaatcaaagtttcagcaatgggctggcttgtctagacatggttttaagaatagctgacgtgaaggaagaggatttattgctgcagtacgactgtctggccctgaatttgcatggcttgagaaggcacaccgtaagactaagtaggaaaaatccaagtaaggagtgtttctgagactttgatcacctgaactttctctagcaagtgtaagcagaatggagtgtggttccaagagatccatcaagacaatgggaatggcctgtgccataaaatgtgcttctcttcttcgggatgttgtttgctgtctgatctttgtagactgttcctgtttgctgggagcttctctgctgcttaaattgttcgtcctcccccactccctcctatcgttggtttgtctagaacactcagctgcttctttggtcatccttgttttctaactttatgaactccctctgtgtcactgtatgtgaaaggaaatgcaccaacaaccgtaaactgaacgtgttcttttgtgctcttttataacttgcattacatgttgtaagcatggtccgttctatacctttttctggtcataatgaacactcattttgttagcgagggtggtaaagtgaacaaaaaggggaagtatcaaactactgccatttcagtgagaaaatcctaggtgctactttataataagacatttgttaggccattcttgcattgatataaagaaatacctgagactgggtgatttatatgaaaagaggtttaattggctcacagttctgcaggctgtatgggaagcatggcggcatctgcttctggggacacctcaggagctttactcatggcagaaggcaaagcaaaggcaggcacttcacacagtaaaagcaggagcgagagagaggtgccacactgaaacagccagatctcatgagaagtcactcactattgcaaggacagcatcaaagagatggtgctaaaccattcatgatgaactcacccccatgatccaatcacctcccaccaggctccacctcgaatactggggattaccattcagcatgagatttgggcaggaacacagacccaaaccataccacacacattatcattgttaaactttgtaaagtatttaaggtacatggaacacacgggaagtctggtagctcagcccatttctttattgcatctgttattcaccatgtaattcaggtaccacgtattccagggagcctttcttggccctcagtttgcagtatacacactttccaagtactcttgtagcatcctgtttgtatcatagcactggtcacattgccttacctaaatctgtttgacagtctgctcaacacgactgcaagctccatgagggcagggacatcatctcttccatctttgggtccttagtgcaatacctggcagctagccagtgctcagctaaatatttgttgactgaataaatgaatgcacaaccaaaaaaaaaaaaaaaaaaaaaaaaaaaaaaaaaaaaa

SEQ ID NO: 599 - protein, 109 aa, Homo sapiens
MSARGEGAGQPSTSAQGQPAAPAPQKRGRGRPRKQQQEPTGEPSPKRPRGRPKGSKNKSPSKAAQKKAEATGEKRPRGRPRKWPQQVVQKKPAQEETEETSSQESAEED

SEQ ID NO: 600 - DNA, 4633 bp, Homo sapiens
atccatgctttacactttatgcttcggccgtatgttgtgtggaattgtgacggataacaatttcacacaggaaacagctatgaccatgattacgccaagctcgaaattaaccctcactaaagggaacaaaagctggtaccgggccccccctcgacggtatcgataagcttgatatcgaattcctgcagcccgggggatcccccgctgtccctttaaccccgccgccgggcgcacgtgagcggctccgggtggcacccggcgccccggccgccgaggcagttgtatttcgaacgtgcctctggctagcagccaggcgccttggctcgcggtccgcctggcctccctcctcctcatacttttcttcctgcgcaaccccctcccctttatccgcccacgattagaggtgggcactccccccaccaccaccccctccccaacgcaagcgcgtgcacgcacacacaccacacacactcacactcacacacactcacacacactcatcccacttgaatcttggggcaggaactcagaaaacttccagcccgggcagcgcgcgcttggtgcaagactcaggagctagcagcccgtccccctccgactctccggtgccggcgctgcctgctcccgccaccctaggaggcgcggtgccacccactactctgtcctctgcctgtgctccgtgcccgaccctatcccggcggagtctccccatcctcctttgctttccgactgcccaaggcactttcaatctcaatctcttctctctctctctctctctctctctctctctctctctctctctctctctctcgcagggtggggggaagaggaggaggaattctttccccgcctaacatttcaagggacacaattcactccaagtctcttccctttccaagccgcttccgaagtgctcccggtgcccgcaactcctgatcccaacccgcgagaggagcctctgcgacctcaaagcctctcttccttctccctcgcttccctcctcctcttgctacctccacctccaccgccacctccacctccggcacccacccaccgccgccgccgccaccggcagcgcctcctcctctcctcctcctcctcccctcttctctttttggcagccgctggacgtccggtgttgatggtggcagcggcggcagctaagcaacagcagccctcgcagcccgccagctcgcgctcgccccgccggcgtccccagccctatcacctcatctcccgaaaggtgctgggcagctccggggcggtcgaggcgaacggctgcagcggcggtacgggcggcgggaggcaggatgagcgcacgcggtgagggcgcggggcagccgtccacttcagcccagggacaacctgccgccccagcgcctcagaagagaggacgcggccgccccaggaagcagcagcaagaaccaaccggtgagccctctcctaagagacccaggggaagacccaaaggcagcaaaaacaagagtccctctaaagcagctcaaaagaaagcagaagccactggagaaaaacggccaagaggcagacctaggaaatggccacaacaagttgttcagaagaagcctgctcaggaggaaactgaagagacatcctcacaagagtctgccgaagaggactagggggcgccaacgttcgatttctacctcagcagcagttggatcttttgaagggagaagacactgcagtgaccacttattctgtattgccatggtctttccactttcatctggggtggggtggggtggggtgggggaggggggggtggggtggggagaaatcacataaccttaaaaaggactatattaatcaccttctttgtaatcccttcacagtcccaggtttagtgaaaaactgctgtaaacacaggggacacagcttaacaatgcaacttttaattactgttttcttttttcttaacctactaatagtttgttgatctgataagcaagagtgggcgggtgagaaaaaccgaattgggtttagtcaatcactgcactgcatgcaaacaagaaacgtgtacacttgtgacgtcggcattcatataggaagaacgcggtgtgtaacactgtgtacacctcaaataccaccccaacccactccctgtagtgaatcctctgtttagaacaccaaagataaggactagatactactttctctttttcgtataatcttgtagacagcttacttgatgatttttaactttttatttctaaatgagacgaaatgctgatgtatcctttcattcagctaacaaactagaaaaggttatgttcatttttcaaaaagggaagtaagcaaacaaatattgccaactcttctatttatggatatcacacatatcagcaggagtaataaatttactcacagcacttgttttcaggacaacacttcattttcaggaaatctacttcctacagagccaaaatgccatttagcaataaataacacttgtcagcctcagagcatttaaggaaactagacaagtaaaattatcctctttgtaatttaatgaaaaggtacaacagaataatgcatgatgaactcacctaattatgaggtgggaggagcgaaatctaaatttcttttgctatagttatacatcaatttaaaaagcaaaaaaaaaaaaggggggggcaatctctctctgtgtctttctctctctctccctctccctctctcttttcattgtgtatcagtttccatgaaagacctgaataccacttacctcaaattaagcatatgtgttacttcaagtaatacgttttgacataagatggttgaccaaggtgcttttcttcggcttgagttcaccatctcttcattcaaactgcacttttagccagagatgcaatatatccccactactcaatactacctctgaatgttacaatgaatttacagtctagtacttattacatgctgctatacacaagcaatgcaagaaaaaaacttactgggtaggtgattctaatcatctgcagaacaaaaagtacacttaattacagttaaagaagcaatctccttactgtgtttcagcatgactatgtatttttctatgtttttttaattaaaaattttaaaatacttgtttcagcttctctgctagatttctaaattaacttgaaaattttttaaccaagtcgctcctaggttcttaaggataattttccacaatcacactacacatcacacaagatttgactgtaatatttaaatattaccctccaagtctgtacctcaaatgaattctttaaggagatggactaattgacttgcaaagacctacctccagacttcaaaaggaatgaacttgttacttgcagcattcatttgttttttcaatgtttgaaatagttcaaactgcagctaaccctagtcaaaactatttttgtaaaagacatttgatagaaaggaacacgtttttacatacttttgcaaaataagtaaataataaataaaataaaagccaaccttcaaagaaacttgaagctttgtaggtgagatgcttcttgccctgcttttgcataatgcaatcaaaaatatgagtttttaagattagttgaatataagaaaatgcttgacaaatattttcatgtattttacacaaatgtgatttttgtaatatgtctcaaccagatttattttaaacgcttcttatgtagagtttttatgcctttctctcctagtgagtgtgctgactttttaacatggtattatcaactgggccaggaggtagtttctcatgtcggcttttgtcagtatggcttttagtactgaagccaaatgaaacacaaaaccatctctcaaccagctgcttcagggaggtagttcaaggcacatacctctctgagactgcagatcgctcactgttgtgaatcaccaagagctatggagagaataaactcaacattactgttaactgtgcgttaaataagcaaataaacagtggctcataaaaataaaagtcgcattccatatctttggatgggccttttagaaacctcattggccagctcataaaatggaagcaattgctcatgttggccaaacatggtgcaccgagtgatttccatctctggtaaagttacacttttatttcctgtatgttgtacaatcaaaacacactactacctcttaagtcccagtatacctcatttttcatactgaaaaaaaaagcttgtggccaatggaacagtaagaacatcataaaatttttatatatatagtttatttttgtgggagataaattttataggactgttctttgctgttgttggtcgcagctaaataagactggacatttaacttttctaccatttctgcaagttaggtatgtttgccaggagaaaagtatcaagacgtttaactgcagttgactttctccctgttcctttgagtgtcttctaactttattctttgttctttatgtagaattgctgtctatgattgtactttgaatcgcttgacttgttgaaaatatttctctagtgtattatcactgtctgttctgcacaataaacataacagcctctgtgatccccatgtgttttgattcctgctctttgttacagttccattaaatgagtaataaagtttggtcaaaatagatcaa

SEQ ID NO: 601 - protein, 822 aa, Homo sapiens
MNGHISNHPSSFGMYPSQMNGYGSSPTFSQTDREHGSKTSAKALYEQRKNYARDSVSSVSDISQYRVEHLTTFVLDRKDAMITVDDGIRKLKLLDAKGKVWTQDMILQVDDRAVSLIDLESKNELENFPLNTIQHCQAVMHSCSYDSVLALVCKEPTQNKPDLHLFQCDEVKANLISEDIESAISDSKGGKQKRRPDALRMISNADPSIPPPPRAPAPAPPGTVTQVDVRSRVAAWSAWAADQGDFEKPRQYHEQEETPEMMAARIDRDVQILNHILDDIEFFITKLQKAAEAFSELSKRKKNKKGKRKGPGEGVLTLRAKPPPPDEFLDCFQKFKHGFNLLAKLKSHIQNPSAADLVHFLFTPLNMVVQATGGPELASSVLSPLLNKDTIDFLNYTVNGDERQLWMSLGGTWMKARAEWPKEQFIPPYVPRFRNGWEPPMLNFMGATMEQDLYQLAESVANVAEHQRKQEIKRLSTEHSSVSEYHPADGYAFSSNIYTRGSHLDQGEAAVAFKPTSNRHIDRNYEPLKTQPKKYAKSKYDFVARNNSELSVLKDDILEILDDRKQWWKVRNASGDSGFVPNNILDIVRPPESGLGRADPPYTHTIQKQRMEYGPRPADTPPAPSPPPTPAPVPVPLPPSTPAPVPVSKVPANITRQNSSSSDSGGSIVRDSQRHKQLPVDRRKSQMEEVQDELIHRLTIGRSAAQKKFHVPRQNVPVINITYDSTPEDVKTWLQSKGFNPVTVNSLGVLNGAQLFSLNKDELRTVCPEGARVYSQITVQKAALEDSSGSSELQEIMRRRQEKISAAASDSGVESFDEGSSH

SEQ ID NO: 602 - DNA, 3887 bp, Homo sapiens
agacttcacaggcagcagctagcgaggcggtctcgcccggcgcgaggccggcgctgtgctcgcctcggagatcgctgctctttagctgggtgcagaaggcggctccgcggctcgcggacgactggctgggcgcgaatcagattggggggctttctcccggtcccctcccacctcgtctgggctcgcggcgtctccggggaaagccgtggccccgagggcggatccgagaacacacaagtgaaagacacaatgaatggtcatatttctaatcatcccagtagttttggaatgtacccatctcagatgaatggctacggatcatcacctaccttttcccagacggacagagaacatggttcaaaaacaagtgcaaaggccctttatgaacaaaggaagaattatgcacgggacagtgtcagcagtgtgtcagatatatctcaataccgtgttgaacacttgactacctttgtcctggatcggaaagatgctatgatcactgttgatgatggaataaggaaattgaaattgcttgatgccaagggcaaagtgtggactcaagatatgattcttcaagtggatgacagagctgtgagcctgattgatttagaatcaaagaatgaactggagaattttcctttaaacacaatccagcactgccaagctgtgatgcattcatgcagctatgattcagttcttgcactggtgtgcaaagagccaacccagaacaagccagatcttcatctcttccagtgtgatgaggttaaggcaaacctaattagtgaagatattgaaagtgcaatcagtgacagtaaaggagggaaacagaagaggcggcccgacgccctgaggatgatttccaatgcagaccctagtataccgcctccacccagagctcctgcccctgcgccccctgggaccgtcacccaggtggatgttagaagtcgagtggcagcctggtctgcatgggcagccgaccaaggggactttgagaaaccaaggcagtatcatgagcaggaagaaacacctgagatgatggcagcccgcattgacagagatgtgcaaatcttaaaccacattttggatgacattgaattttttatcacaaaactccaaaaagcagcagaagcattttctgagctttctaaaaggaagaaaaacaagaaaggtaaaaggaaaggaccaggagagggtgttttaacgctgcgggcaaaacctccacctcctgatgaatttcttgactgtttccaaaagtttaaacacggatttaaccttctggccaaactgaagtctcatattcagaatcctagtgctgcagatttggttcactttttgtttactccattaaatatggtggtgcaggcaacaggaggtcctgaactagccagttcagtacttagtcccctattgaataaggacacaattgatttcttaaattatactgtcaatggtgatgaacggcagctgtggatgtcattgggaggaacttggatgaaagccagagcagagtggccaaaagaacagtttattccaccatatgttccacgattccgcaatggctgggagcccccaatgctgaactttatgggagccacaatggaacaagatctttatcaactggcagaatctgtggcaaatgtagcagaacatcagcgcaaacaggaaataaaaagattatccacagagcattccagtgtatcagagtatcatccagccgatggctatgcgttcagtagcaacatttacacaagaggatcccacctggaccaaggggaagctgctgttgcttttaagccaacttctaatcgccatatagatagaaattatgaaccactcaaaacacaacccaagaaatatgccaaatccaagtatgactttgtagcaaggaacaacagtgagctctcggttctaaaggatgatattttagagatacttgatgatcggaagcaatggtggaaagttcgaaatgcaagtggagactctggatttgtgccaaataacattttggatattgtgagacctccagaatctggattggggcgtgctgatccaccttatactcatactatacagaaacaaaggatggagtatggcccaagaccagctgatactccccctgctccatcacctcctccaacaccagttcctgttcctgttccccttcccccttccactccagcacctgttcctgtgtcaaaggtcccagcaaatataacacgtcaaaacagcagctccagtgacagtggtggcagtatcgtgcgagacagccagagacacaaacaacttccggtggaccgaaggaaatctcagatggaggaagtgcaagatgaactcatccacagactgaccattggtcggagtgccgctcagaagaaattccatgtgccacggcagaacgtgccagttatcaatatcacttacgactccacaccagaggatgtgaagacgtggttacagtcaaagggattcaaccctgtgactgtcaatagtcttggagtattaaatggtgcacaacttttctctctcaataaggatgaactgaggacagtctgccctgaaggggcgagagtctatagccaaatcactgtacaaaaagctgcattggaggatagcagtggcagctccgagttacaagaaattatgagaagacgacaggaaaaaatcagtgctgccgctagtgattcaggagtggaatcttttgatgaaggaagcagtcactaatttgtttgtttgtatttaaactccattgtttttggcattattccaacatgctttgttttaagaagccttgaagggaatgtcagattcatttttcttgatgtaatttatcaccataaaaaaaaaacccatgcaaacctgagtgagcacaggatttgcttctaggcccattatttttattaaaactgaaaaaatttaaactgaattttttgaccttggaaaatatttttcttactttaccaaggtgaagtttccttaattagactaattattttatccccatcccagggtataaacaggaattgttttgatagtggtggagttattcactgcaacaaagcaacaatgttgtccatgattcaaaatctaagcagtttcgattttgcctgtgaatatggtgtctgtcattcagggcatagctcactgtaggctagcctctgcttacttaagtctcttctctgacatactcaatggaagaatatttagatttatttaaagttcttaatgccaacagtttaaaaaaaaattaaaacatttgaatgaactgtaaagtacagccataccttggacatgcaaatataaatctatggagcattctcaagacagtttgtcatggctctgttgattgcaactccttgtatagcttgtattttgatttagtttatattctgcttattatgtatactgtgttcttatatatgagaaagcacaaatgcgaaagaggtcatgtcttctcaaaatctagcaaaggaagtagtctgcattggtgtgcattacagtattttgcttaatgaaagcctcagttctgaatgttgatatgagtagttaaaaggaagtggggccattttatgtgtttatctgtgtcaagtatttctggtaataagaagcacttaatttacacatattttaatcctgtgaaagattccacatagagaaaagaaagatacctaaccttcaacaaatgttatttttggaaacacaatttttgtcattaaatgttatattatttcacatatataaaacagatgttatgtaagaatgttgtatattttaacataaatcatttagagaaattatctagattcattaattttcatagtgcctttttcacatgagtcagctggaaagtctgcaataaacagtatttgctgtctgttaaaaaaaaaaaaaaa

SEQ ID NO: 603 - protein, 334 aa, Homo sapiens
MATLKEKLIAPVAEEEATVPNNKITVVGVGQVGMACAISILGKSLADELALVDVLEDKLKGEMMDLQHGSLFLQTPKIVADKDYSVTANSKIVVVTAGVRQQEGESRLNLVQRNVNVFKFIIPQIVKYSPDCIIIVVSNPVDILTYVTWKLSGLPKHRVIGSGCNLDSARFRYLMAEKLGIHPSSCHGWILGEHGDSSVAVWSGVNVAGVSLQELNPEMGTDNDSENWKEVHKMVVESAYEVIKLKGYTNWAIGLSVADLIESMLKNLSRIHPVSTMVKGMYGIENEVFLSLPCILNARGLTSVINQKLKDDEVAQLKKSADTLWDIQKDLKDL

SEQ ID NO: 604 - DNA, 1336 bp, Homo sapiens
ggggcttgcagagccggcgccggaggagacgcacgcagctgactttgtcttctccgcacgactgttacagaggtctccagagccttctctctcctgtgcaaaatggcaactcttaaggaaaaactcattgcaccagttgcggaagaagaggcaacagttccaaacaataagatcactgtagtgggtgttggacaagttggtatggcgtgtgctatcagcattctgggaaagtctctggctgatgaacttgctcttgtggatgttttggaagataagcttaaaggagaaatgatggatctgcagcatgggagcttatttcttcagacacctaaaattgtggcagataaagattattctgtgaccgccaattctaagattgtagtggtaactgcaggagtccgtcagcaagaaggggagagtcggctcaatctggtgcagagaaatgttaatgtcttcaaattcattattcctcagatcgtcaagtacagtcctgattgcatcataattgtggtttccaacccagtggacattcttacgtatgttacctggaaactaagtggattacccaaacaccgcgtgattggaagtggatgtaatctggattctgctagatttcgctaccttatggctgaaaaacttggcattcatcccagcagctgccatggatggattttgggggaacatggcgactcaagtgtggctgtgtggagtggtgtgaatgtggcaggtgtttctctccaggaattgaatccagaaatgggaactgacaatgatagtgaaaattggaaggaagtgcataagatggtggttgaaagtgcctatgaagtcatcaagctaaaaggatataccaactgggctattggattaagtgtggctgatcttattgaatccatgttgaaaaatctatccaggattcatcccgtgtcaacaatggtaaaggggatgtatggcattgagaatgaagtcttcctgagccttccatgtatcctcaatgcccggggattaaccagcgttatcaaccagaagctaaaggatgatgaggttgctcagctcaagaaaagtgcagataccctgtgggacatccagaaggacctaaaagacctgtgactagtgagctctaggctgtagaaatttaaaaactacaatgtgattaactcgagcctttagttttcatccatgtacatggatcacagtttgctttgatcttcttcaatatgtgaatttgggctcacagaatcaaagcctatgcttggtttaatgcttgcaatctgagctcttgaacaaataaaattaactattgtagtgcgaaaaaaaaaaaaaaaaaaaaaaaaaaaaa

SEQ ID NO: 605 - protein, 364 aa, Homo sapiens
DGCGHTVLGPESGTLTSINYPQTYPNSTVCEWEIRVKMGERVRIKFGDFDIEDSDSCHFNYLRIYNGIGVSRTEIGKYCGLGLQINHSIESKGNEITLLFMSGIHVSGRGFLASYSVIDKQRSNYLFGHCIQFFWNLSSVSTAPAGCLLPFAEISGTIPHGYRDSSPLCMAGVHAGVVSNTLGGQISVVISKGIPYYESSLANNVTSVVGHLILQVFFTFKTSGCYGTLGMESGGDRGSSNNSITVLEWTDHTGQENSWKPKKSQAEKTWTALGAFATDEYQWLQIDLNKEKKITGIITTGSTMVSTITMCLPTESCTVMMGRNGLCTESLVVEQDKIFQGNKRIITRMVRNNFLPPIIARLLE

SEQ ID NO: 606 - DNA, 1388 bp, Homo sapiens
  misc_feature (692)..(692): n = a, c, g, or t
gtgatggatgtggacacactgtactaggccctgagagtggaacccttacatccataaactacccacagacctatcccaacagcactgtttgtgaatgggagatccgtgtaaagatgggagagagagttcgcatcaaatttggtgactttgacattgaagattctgattcttgtcactttaattacttgagaatttataatggaattggagtcagcagaactgaaataggcaaatactgtggtctggggttgcaaatcaaccattcaattgaatcaaaaggcaatgaaatcacattgctgttcatgagtggaatccatgtttctggacgcggatttttggcctcatactctgttatagataaacaaagatctaattacttgtttggacactgcatccaatttttttggaacctgagttcagtaagtactgccccagctggttgtctgcttccttttgctgagatatctggaacaattcctcatggatatagagattcctcgccattgtgcatggctggtgtgcatgcaggagtagtgtcaaacacgttgggcggccaaatcagtgttgtaattagtaaaggtattccctattatgaaagttctttggctaacaacgtcacatctgtggtgggacacttgatactacaagtcttttttacatttaagacaagtggatgttatggaacactgggnatggagtctggtggtgatcgcggatcctcaaataacagcatcactgtgctggagtggactgaccacacagggcaagagaacagttggaaacccaaaaaaagccaggctgaaaaaacctggaccgccttgggtgcttttgccactgatgaataccagtggttacaaatagatttgaataaggaaaagaaaataacaggcattataaccactggatccaccatggtgagcacaattactatgtgtctgcctacagaatcctgtacagtgatgatgggcagaaatggactgtgtacagagagcctggtcgtggagcaagataagatatttcaaggaaacaaaagaattatcaccaggatggtgcgtaataactttttgccaccaattattgcacgtttattagagtgaatcctacccaatggcagcagaaaattgccatgaaaatggagctgctcggatgtcagtttattcctaaaggtcgtcctccaaaacttactcaacctccacctcctcggaacagcaatgacctcaaaacactacagcccctccaaaaaatttagccaaaggtcgtgccccaaaatttacgcaaccactacaacctcgcagtagcaatgaatttcctgcacagacagaacaaacaactgccagtcctgatatcagaaattacctaccgtaaactccaaatgtaaccaaagatgt

SEQ ID NO: 607 - DNA, 135090 bp, Homo sapiens
gatcattaatggaaatacaaagttcttagacaaaagatggaagaaataattcaggaaggaagctaagaagaataacatttcacataaaaagcagggaatcaaaaacagtgtttggctaaaggaaaaaggtggtaaagacaagagaaggaaaaacaaaactactccacattgccagatatattacacttgttaacactagggaatccaggctatctataccatcctatgccccctaaaaccatgaagtgaatttgcaaacattaacagattatagaagtgctgttacctaactctccacacgtagcagaagcccaagtgcctgtagagttagagctgggagttatgaggaaaagctacaggaagtatgtcttggcccagaataaggaagaactttctgacaataagatgtgccaacagtggaatggctttttccccaaagtaatgagcttcctgtcactggagagtcaggtagctgctagaagattggcagggttgcaatcaagggtctctagcatgaggtcagagtttgaatcgggtgaacctgaaggtcccttaccaagattttgtgattctatgactgttttggttacaccttttttctctttcatactcagttttactgtgtttcataagtatcttttaataaacagagggcagtacttaggcttatgaaataagatgaactgtggcaatccttttaaaacagtaatcaaatgaaattcaaaataatatgttagagggaaataaacaaaatataagattttttgaaagccatattgtttaaaacctgtgggagtgattataaatcttaatagaatgaataaaggtgattggcactggacaaaagcatgtctagaaagagtttattgttgcatttagcagcattctgacaggaaagggcttacacagagtgcagtagtaagaaagcaaaagacgtgtttaaagagctacaggcaaatattcttgtttattacaggtgatcggaggatagtattgagaaccaagagatcagaaatagtgttaagtcatggggaaccttgaatttcaggtttagatgtttggtttttggtggacacctgatttcttttgatggttttgttgtttttgaaatagagatggacatgatgtgaactttttattacacaattattgatcttggtagtggtggggaaggagtttttaaaaaggaggattggaagggaagtagaaaaagttaggtgagaaaatcgaaggccagaatataaatagagaatgaaaatggagaacaggggagcacaagaaagccttttacagttagaagtagtgaggattcagttcctgggaggacagagctgcctttcattgcaatggaaatacgtggagagaaaagctttggagggcatcagtgggaaaggaggttgtcttgtccactggtgtcccacactgcagaagtggtgcatggaacagaggtcaggagttgagatcccgatttggaagttatttacacagaggatgaatctgcaatcatgaagtctgatgaaattccaataggaaaaccatagggggtggggtgggagagaaaagagatctctgagctgaactatagacagcagcaaaatttagggaaaaaggagaaaaaagtaatcagagaagaaggtgttatagactacttaatgatgtaagaagaaaaaccaagagaatatttcttggaatctgagaaaagaaaatttcaagagaatgtaatcagggatcctttgggagcccctgtagtaagaagtaagaaaaaaatgtgagatggaagtttccatgggggatgtgaaccatcccttcaagaggtttggaactggggtggccatataattttgtaaatgtgaaagaacaaacagtaaaattacattagtcaaagttttgcttgttactcaaagcaactttttatgatctcttttttccccttctgcatgatagcagtgcctctctgtgtgcaggtctatgtgcaggtcttccatgcagcaggcagctcagacttctctcaaggataaaggctttatgtgggataaatttgtaattttgattcaaactccagtggaagacagtgattgttgctatttttcttccttagggagaagtagacaatcagggcatgctaacatggaactttcagttctctctgaaatactgttatgtgtgcagtaacctttttctaagattgatttttgtttagtaattcagaaagggcaaattccctggtcacaattagtttcatcatacatacagataacaccataattttggagtacttaaaggtttgcttgtttgtggtttgctctctggggttgtgtctggggttgaaaataaataaccacagcccttggttcaaatagcttatctgttacatggtagcagctacaaaacatgctactgataatcaaatatagcaattctactaaaataaatgtaacatccaccatatgtatattgaggcatgttctaaggaactgtgtactatgttagcattatatgtatttatatgtagacacatacatagatatatttgtacatagataacacacacatgcatatttattaccttcttttatgacaccctccttagaggggtggtattattgtcactatgcagatgagcaaactgagtttgtgagagatcttataagtactcgatctcagatggatataagaactgaagtgagaaatggccctggggcaatctgttttcgaacctgatattctttttctctgcatcatgctgtactacctaggatatggaggtgttgttactgccaaaggactttgatattgaggtgtgcaagtgagagagctaaagtgtggatggttttgcctcagctgggcagactggcaccaggtctgcgtctaccagggcagtgtcccttccaccactaggtgcttcaacaggggcagttttttctcttttggaataaatttcacaggtactccatctaatttttacctttaaaacttcttgccattagcatcctttaaaataatatgctggtattttattatactgttatgtgtcttcaagcatttcatgtaatctggtattctttgtaagtttagaactgtggattaccagataaagcctgccattaagggtgaacaaagagtttccacctattggaagcagtcaaatagcatcacagtttaaggataattttgtactgtcttttggaagttgtaatggaaacaaaatagaatgtggttcagttttaatcatatatgaactgttttaatgagtgctgcactgggactcaagctatgaaaccaaaacaaaccagaaaaatggcaatggcacgcatgtttgggggaactttatctttttccagtagttcctccttgtgaggagagctcaaggcttgctttactctcggagggactcaagtgattggttatttgtggaaagcaaaattgggaattctcaacctgattctcccctcttttgtggggcagctgcctacccaagggaggaggcattatgcattctagtgcatttctacaggtttgttccccaaagtgggttcatgggtctgtaaatgttggttgcagtcaagttatgtcagtaagcctggttctcaggttcagttgctaagtccagctctatttggaataacaataatattttaacctttatatttacttttagattttatttctcagtctatactgatcttgatagggaagagtgggctaacacaggggactcatagatatatatgaaatagatattatcagtgaataattatatctgatcatttatatacatctgacactgaatttatatatacttttgttgaaaataaacaaatgttctgacactaaatcctttttatgccttgtatctttgtttttttttttttttttttttgagacggagtctcgctctgtcacccaggctggagtgcagtggcgcgatcttggctcactgcaagctctgcctcccgggttcacgccattctcctgcctcagcctcccgagtagctgcgactacaggcgcctgccactacgcccggctaactttttgtatttttagtagagatggggtttcaccgtggtctcgatctcctgacctcgtgatccgtccgcctcggcctcccaaagtgctgggattacaggcatgagccaccgcgcccggcctatgccttgtatctttgatagtgtattgaaattaaggagactaaatctttgaatttaatgatattacagttgtttcttaaactatgtttcgaatatctaattttctttggctgtagttcaatgatttcttttttattgaaggctctaaataagagttttattatgttaaatattgtatatttaattatatttattacatataatttattctttaaatttgagcaatatagatcatatattttgtgcttaaataatagtagttaatcgatatattattaaattcgttttagctatagaactcttaatatgtctaaatttattttctttgatatcattttaatactcagcacaaattgtactgaggtaattgctattgcataaatagttgtagttaacatcatttgatttataattttataatcctgtaatctaaaagaagtataattcttaatttcatctgatatgtaactgaaacattttaattaaaaatagtaatgcctatatgtcttctagtcattcatttaccaccatcaagcccctcatctgccccacaaacatacttggaaacaaccaaaatgtaaattgacttttctttcaatagctaactcattattccaaaaaattatcaaatttccttacctacacaaacacactccacattttattggatgtgattatgctgtattaattctctaaattaatgtaagaattcttcaatctttatactcttaaaacttcacatccaggatagttattaatttttaacctgtctctcacagtagttgtacaaatctcaggtgttaacttaaatatttatatacattaatagtcatctttatgtttttgagtcagggatcctacagagaatctgatgttagctatgcacaagaattcataatcacttatcacgggtcaataaactgcttagagcagttgcaagaacaagccaggtggagaatcccttctctactgtcaaatatccactggggcgtaacaaaaatatgaatgcttccagaaaagctggagaccagcaaatagtagaaattggcatgaagcactgaaattaaagatttgatttaggaactatcaaacatgcttccatcagggctaatatcagagctttctggaaaccacactaaaatttgaaccctccttcccctcccagatgtcaagaatgagtactgatgcaaactttggccatttctttttcattacttctgctttgcttgagtatctggatttgacattgtatgttgttactaatattgtcttattttaaaaagcatgatccttttgtggtgtcaaagctaggttcatgcagtgctctgttacacttggcaatgatgagcaggccttatttaagactagccatgctcgtaggatgttttgacctcaagaattattatatgctttactagaagcacagaatacaaaggactctgaaatgaccttcttagccttttaattgcaactctttttacttaatggcagataattggttttggattgccttacatcatggaaacttcaaaaaccagatgattttttttcttttattctactgttttgctctttaacataataggataagtatttttttctgtgttccattatcatacatgtgtattgcaggtgtagttggcattggaaattttggcggctgataaactggcaaaaaagcttttgaatattagatgcagaaattagatagggctaagctaccccatttaataaagttaacttctcttttgtcatgttactgacaaatgttgcatatgaacaatagcttatatgcacagtagaaaccaggctctttctcttgagagtaattctacatctgtggaaaggggaacattagaagtgggagttactttaacaagtgttgctatgccgacttaccaacaactgctgcaagttattttgcaagaaagacaaggtggaatgcacatgtattctcaagaataaatgtccatttatagcaatttttacattaccaaatatttatcagttagctaatatgtacaagtcttgaataaccttattattcaagacttattattcaaggttatttgtggtcatgattaaacttattcaattcccagtctgtgaatttagctcactatataaggttgtaatggtaataaggttacttgtaagaatttagaagtgctcatatgtacacatagctatataaggttacagtgtatgtaatcataagtatgcacatatacattgtgcaaatccatgtagcaaaaatttggctgtgctaagaaaaaattcaaaggaatatatccttcaagaataaattgaagagataaagagatttccattctctgccttttctgaagtcctttgaatagtacatttttctgagagagacattcttgtccccccacatcattccaagtagaagcagagaaacctttaactcttcatcagtgaagttgctgagcctcaataagaggacagattttacaagcttagaacatgtatttgatgtctgtgtagtgtatgtttctgacgttaaggtgtttgaggatactctcatagttaaatgtgtagagtactgccctgttacatcattttctgtggttgtcttggacttcaaattgcaggatttcttaggttgtggcacttttaacttgcatagaaaataatagtctcaaaatgcaggggtaggaattggttcaggaagccatgtgggaagatgtcttaattttttttaattaaaaggattgtcatgtaagagtaagcatcttgttaatggatgttatgaatgaaagtgatcttcaaaatggaaaattacatagcctagagttgacttctgaatttcagagtaatgaatgatgtctctagggtgtgatggggagcagtaaatgaagtcgttaagagaagaggttctggagctgtactccttgagtttgaatcctgttctaccacctccaagccttgtgacttttggcagttacttaattctttttaagccttggctttattaactgttcacttgggttattagtaacttctgcctcactgggattcctagcatattgtaagaatatatattatatatatactatatattatattatataatatattatataatataattatataatatatataattatatatatagtatatatagtatatataatattatgtagtatatatactatataatattatatagtatatatactacataatattatatagtatatatagtatataatatatagtatatatactatataatattatgtagtatatataatattatatattatatatactatataatatgtagtatatataatatataatatatataatatatactatatagtatatataatattacatatatataaatggagacctcattggagagcaagattctaatgatagttgtgccactgagtaactatgcagacttggacaagttgcaccccatttttacctctccttctaaattgtaaaattagacagtcactatatgctgtctcattctgtaccaattaaaaattccataattctatgagtattttaccaatgaataccaaatttttaaaaaaacttggatcattctgaaacttgagtaattgaaatgcctcccaaactgttttattttctgaatgtaaaaagcagacccttgagtcagtctcatgcctagaaggcttgccacttagggttagcctagaaaacagttttttggtgaagtttacctcttaaaatgcccatcgtttcagcattagcaactgaactggctagaagagcctgctgctgcaaggatctgtgtgcatagagggaataaaatggagtggacagcaagcaagggagcgggattattggagagatacagcaaatggaaagaggcaagtgtaactgaatggaaaaaaaaattctccagagagagtggagaaaattgttgaaaggaaaacataggaaactttatctcagggatttattccaagaattaaattccagagaagatgcatttccacaatgctttctcagtccatacttaggctgtgctgcagtgatgatgattattcaaaataagaaaattgtaatatcctgaagaatcaaacaaaagttaaatgatttttattgttccatggaatacagtatattctttgaaaatgaattttaggagataagattcctgccattaacttaaagattatgaaaaccctaatttcctgagcattcttattgatactttaccgtctaaataaggcgttagaagttttcatagttaactggttgtttcagttgtattttacccagatcaaaatttgtaagccacgaggctgacagtagcattccaatgctctcttgtgagctttttaaaactttgctaaccttataagatatttaaaaaattaccaaaagtacgtaacaaagccaatcacacagttgaaaaatgacagaaatccatttcatttgtaatcatctggcataaatcattacttctgtaggtagatatgtatttagctacttaaaggaggaaaactgatggaaaatattttatttttttattttaaaatatattttagtaagtaaaatgctaagaatataaatgaaattttgacctctgatttactcatgttattattacctttgtgtatatttcaacatgacttgcagatatacatgaatggattcttaatataaaactgggtaaaagttttataaaacttttatatatggtaaaaattttttataaaagttttataaaactacttatatagggtatgtaaatataagcttataaaaatgtattatctgcattctctgcaaaatcagatatgtgcttttgacaaatatataaaatacatttcctgcttttcctgtttttttgtttaataattttcatgttacctaagtgcctatgcatttttcatattcatgacaaacttaaatggtatttacttggttaggacagagagagtacttggaaataggaaaataacctatctaaaaaattcaataaccaaagatgacaaagcattggtaagcaaataaatagtaaattctactttttacaataacatgcagaaaaaaattacatatatttttaataataatgagtagggatatcaatatctttcactaaagacctttacttactcttttaaaaaaacatgtatttttcctcatgatcttatttagtgaaattgttctaagaaacataaaaagataaacagtatttagagatacatcttttattaaatctacattcaggtttttcttgagataaaatatagtttttacaattatacattttaaattacatattttaacattagaacaatatataggtaatagtaataattaccattgcaaaaaagagcaagagtcaaattgaaaaatagatttaatttccaagaatagtaacattaaatcatccataattttagattaaccaaatccaaatcaaaagccaattgtgcagttcaatcacttatttcaacatggtacaaaaaagtcaagtgtgtgaattatctggcagaagaaaaaaattcaaaagtgggcattcctcaatttgtattctcctggattgaaacattaagacttagaaaactccgtagtatctaatttggtatatttcattagtgcttgaagttcgcaacactgaattcctgtttcctaagcttatctaaatgctaaatgaaatgtatgaaatatctttctgttgaacaacagttacagttcctactggattttcttttggttggaagactgaaagagtgctcagagagaagtcagagagatccagttcacatgctaatacatgatttattattcttgatttattattctgtgaaatgtgaaaaaaaatccttccctagatggtgtcactgattgttttgtttccaaagtattagtgataagaaaaatattatgtgagctcaaaattgtaaaacaaatacatacttgagaaaacaatgtctaacaatgtgatgttcaatataaacaagcttttctttatgctataattttgcagtgaaaagatttttgaaatgctttattaatacaatctgagtatttgacatgagttgtagcacatcacacagaactgttctagatcatgtctactttgttgtaaatgttcataagaaaatatctagccttaaagattgtacaacttggcatttccttacaaacacattttaaagaaaacagtgtggatgaacatttaaaggcttctgatttctaggatttaagggagggaaatttctaagatcaggcaatatcatttttataattatctgattaaatgatgttttttcttaagaaatctgatatcaggtgatacaataatatggacttcttcctccaaaaatttttcataaaatagctggcttccttaaaactgtaaggaaaaagcttctgcttctattctatttgaggtaataattggtaggtaagagtttatggaaaggatttgcagaagagatacacagacacagcttttaacatttctaatatactgatattcagtatgagtctacagttgtggccatcaagttgttttgtgataaagtagatgactacagggatatttgaaaaatctcctcagatgttgggaatattaggaaataaactgagtctactgccacttcaaatacagagtacttccaaatactgaggctacaacataggatgagaggaatgggacataaggagaattaggattccaaccagcccaataaaggtcagaattgtgggtcattcaataattggactgtaaaatattgttgcctgtgaaagtcaaaagagatgtgaggaacatttattttgtattttcaagttttacatgactaaaacattttctacagagtggtaaaagagtaaagaaatatgtgctacagattcactgatgaattaataacgtttttcgatacaaacatgtaattgtctctaatctttctttagttttcaattaggaaatagcctaggggaaaagtataagtaacttgaaaacatatcgtaatatctttggcagtcatagtcaaggctgttctgcttatacttgttggctgatcactataaacattgtctacatgatgaaaatactaacccaaagtttgtaaatataaaattaaacactatattaaacctcttagtttttttgtttagaagttcttttcacatcatgatcaactgtgtttgaattcaaaatagtctttctggtttacatgtcagtgaaatacatgaatttttagtgggtgtttctgacatgcaaaagggaaaggaacagaatatcataaatattaggttccttctccccctaacagcatgtagtgaatataccctgcaagatgtttttatgattcatgtaattttgtgatcaaataattcagtcaactaaaaatatatttttccagtgacagcatggctatttgtctgaggcaaaagtataaccagttgaaaaggaaagttttgtttcctttattacatggttaaatttgactatttcagtagtcaaacttttaaccactagctagactttaatttgtggcaaaattggtttctagtaatccattaaattagtttgttgttatactttagatttgtgttaacacaaagaatgtaaagttattttaaggaaaaaacattagtagatgacttcgatttgcgagtttgcatttttaagggttgtttgaggtcccttccttatgttcactttagtaatctcactttagttcctgtgaagggaaatccctactgtgtctttagggatgggttaggatagtgggctgcctttaggaaggctaataaaaccttcctgagacaccttactaaaggtattcctcacctcatgaattggtctaagcatcagtcttggaggctcagaagcttgactttgaacccactgtaagagtagatccatctcttaaaaatagattcgtccataatggtcgaactaatttacactcccaccaacaatgtaaaagcattcctatttctccacatcctctccagcatatgttgtttcctaactttttaatgattgccattctaacttgcgtgagatgttatctcactgtagttttgatctgcattctctaatgaccagtcatgatgagctttctttcatatgttttttggcaacataagtgtcttcttttgagaagtatctgttcatatcctttgcccactttttgatggagttgtttgtttttttcttgtaaatttttctgggtatatacccaaaggattataaatcattctactctaaagacacatgcacatgtatgtttattgcagtactattcacaatagcaaagacttggaaccaacccaaatgcccatcaatgatagaatggataaaggaaacatggcacatatacaccatggaatactatgcagtcataaaaaagaacgagttcatgtcctttgcagggacatgaatgaagctggaaaccagcattctcaggaaactaacacaggaacagaaaaccaaacaccacatgctctcactcgtaagtgggacttgagcaatgagaacacatggacatagggaggggaacatcacacactggggcctgttggggggtggggggctaggggagggatactattaggagaaatacctaatgtagatgatgggttgatgggtgcggcaaacaaccatggcacatacatacctatgtaacaaacctgtaccttctgcacatgtatcccagaactttatatgtttttttaaaaagccattttttagtcaagtaaaaaaaagattcatctaaattaatataacatatttgtttatttgtttatatatgtatggatgtatatatgaattcttagggctagagacaggcactataataggctttgaagatacagtagtaaataagtcattgtcactgtccaagagggaacagatatgttgaacaagtgaaagtttgcttatagtcagagctgatattcagttgtttttagttgtctgccatccacgtcagtatccattctgattgatcagagccctaaatattaccatagtttttatatcactgtattgggactatctctctacttgggaaaccaaattttaatgtcaatttgttgatatataatgagaaatatttcagaggaaccggaagagtagatagttcacctatgtagaaaaccaaacaatgatctgagtgtgaattagaagactgagatgaatccagtgtttaatctcatcaaaccaaatgaggtttatgtatccatctgatgagagtcttgatcttctcagtggcacaaggattctgagtcatttgcttggatttttgtagttggcccagtacagtacttgggtggatattactattgagctcttcttagacttttcttttactatacttggtgtatgtctctacattcagtctggtaacagtcaagtcttattcttctcagattctgtttgtctaagatgactacgtctttttgtctcagtgcaaaagagttaacatttaacactttgaagaacaatctgatttctaagttcttaagaaataattcatcatagcttccaaggactaacaagagtttctatttgaataaagtagctaaatattcttttgatttctatgttggttattttttatattctggaccaaactaccatgttttttctggccaacagatttaaaatctaaacataaaggtttatttttcataaatatgttttgaatttgaccttcacagggaacattttaagtatcataatcaatgaggtttcaggtacctctttacagagagctactgtgattatgtttttgtggttggatttttctgaacccattagctgcatggtaatggggtggtggaattaaggttttgagaatcatcataccgcccgcttaccagaagtcaataaaaaacaaacatgaatgataggtttatgttctaggacagtatatttctaaaatggtatttgttaatccctccagagaatacatcaaagggaatatgaaactccaactttgatcaactgagccttcttaaaattagactcagcatcaaatgttaaaagatcagatggaagaggcaaaatttagatataagcatgagataggtcatttatccagagggaataatgtgtatatttatattggtaaaaaaaaggaaaacaaaaattttgttttctaattccctacattattaaaaagtatccctcctctgttcattcctgacatcatttggaaatatctgctgcttcagtgtgaatacagagtggacttcagtaaccaacttcttccatgtgcttcaaaaacattcatggatcatgagcaaagcaatatttgaatgtgaggggtggttttttttttttagatatttagacttcatagaaaagaaggaactggtttactgaaatttatgttaaatcttaatgggaatgtaggaaatttcatttatcagcaatctaccttgattggtattctacaatgaattaatgaatttctatttgtttaggcttatctggaaagttctgcattccaaatatgttaagaaaacatggtgatctttaaattagtcatctttggttttttgaattgattgggatttgacaaaaatgtaattattaatttctttcaatacaaacttttttttcttgatcttatgggaatactagcacagttgggcctaaagagggttctaaaatgagggaagctaaactttgtttcaaagttacaatgccatcacattttaaagcattaatgctgagatattaagtaagtgatccaatctagttaggtggtgagtggaaccagagcttacatctttttctcacttcaatactgttttcactgtatcactgcagtttgaatagacatttctttatgagcttcctcagtgcctcttgtttcaatcaaacataagacaatgaaataaccagatgttgcagataaagttcctgaaacaccagactctgagatagagattagaatgcagggggttggtcagggactaatcttggagcaacacctctgtggaaagtgaaggaagaatggggcagaggaagaagttggcctgtggcacagtcccaacagcggcctcagcagatactgcaggcccccatgtagctggaatgccccacatagttgcttagactggcacaaggggactggaccttatcccccactttgagcaatcactggatggaagctacctgggaaggagtcataactaggtgaggtgtctctcttcagtcctcccgtagtctgagggaaactcaacagggtactgtcactggctgttagtctcaccagctgagagaatgagtacagtgtcgaagagggacctggccagtgctccacagcatctactacaccattattgaatgactacatgatgttggctattgcataagtcactctatgtagggtttcactaatccatagagtaaacacacacaaaaaaaggtgctgatgtcttcccttttctaggaataaatcatgatttagagaggttgaataacttgcccaaggttacataaaaatggcaagtctgtctggctaaaaagctcattttttttcataaagctgctctttaggtagcataaatggtggagggtggattttctaaactctgtggttcctcaaaatcctttgattgtggagaaaatttaaatattgtattcataaatactgttaccacaagtactaccagcactcgggatatatttaccattgaatgatgattaaaccaagttagttaggatccctgactttgaaaagcttacagacttgattgcataagcaaggtaatttttaaaaatgatacacagaaatctgagtttttttcatcgataatgtaacaccacccactttgtaaagtggttataagaatttatatgtggaatgataatagcacaaagtttgagacatcttaggcacttgaaaatttactttctgtgtttatattcagtacaagcatagagatattagagaatatttgcatttatcatagttgggaaaaaataattttcattttgattttaattagcggtgtcctcttgggcaagtcagttggtatctctggcccttggcttttacatttcaaaaatgaagtgcacaaggtggatgaattataaggtttataccagcagtaatattctactaaatgctgttgacaatagagatccaggtggttcaagatgaaacaactcataaactcagcaactggtacatgatgcacctgtgtgaggaagtttatagtactctgctatggcttcttgtctttcctaaagaaatccatttcctctttaatatttataatgtgtgccttatgcaaagtatgtgctgaataaatataaagtgactagagtgagacagagatattatatgaaatcagatataatctcatcctcaagtggaattcagtttaacttttatcatgatcagtgggaggagggagcaagcaaattgatcagttcttctaccataggaaaattcttgattattaaaaaacaattatctcttatggtcatactgaccaaaagcaatttatatattcaaagctgttccgatcaaactaccaacatcattttttcacaaaattagaaaaaactattctaaaatccatacagaaccaaataagagtctgaatcactaaagcaatcctaagcaaaaagagcaaagtaggctgggcacggtggctcacacctgtaatcccagcactttgggaggccaaggcgggtggatcacgaggtcaggagattgagaccatcctggctaacacggtgaaaccccgtctctactaaaaaagaaaatacaaaaaattagccgggcatggtggcgggcacctgtagtcccagctacttcggaggctgaggcaggagaactcaggaggcggagcttgcagtgagccgagattgcgccactgcactccagcctgggcaacagagtgagactttgtttcaaaaaacaaaacaaaacaaaacaaacaaacaaaagaacaaagtgggggcatcacactaccagacttcaaactatactacaaggctacagtaaccaaaacagcatggtactgcactaaaacagacacacagactaatagaacaggacagagaaccctgaaataaagccgcacacctacaaccacctgatcttcaacaaaggtaacaataacaagcaatggagaaaggactccccattcaataaatggtgctgggataactggctggccatatgcagaagattgaaactgaaactcttccttacactacacacaaaaatcaatataagatagatcaaagattaaatataaaacccaaaattataaaaaccctggaagacaacctaggaaattccattctggtcattggcctttgcagagactttatgaccaaatcccaaaaacaactgtagtgaaaacaaaaattcacaaatgggacctgattaataagcttctgcacagcaaatgaaactattagcagaagaaacagacagcctacagaagggagaaaatatccactatgcatccaacaaaggtcaaatatccaggatctataaggaacttgaacggattggcaagcaaaaaacaaccccgttattactcatcactaatcattagagaaatgcaaatcaaaactacagtgaaataccatctcacaccagtcataatggccattattaaaaagttaaaaaacaacagatgctagtgagtttgcagagaaaggtgaacacttatacactgctgtcagaaatgtaaattaggttagccactgtggaaaacagtgtggagatttttttagcgaacttaaaacagaactaccattggacccaccagtctcactattgggtatatacccaaaggaaaataaatcattctaccaaaaagacacctgcacatgtatgttcattgcagcactattcacaatagcagagacatggagtcaaccacgatgcccatcaatggtggattagataaagaaaatgtggtccatgtacaccatggaatactatgcagctataaagagaatgaaatcatttcctgtgcagcaacatggatgtagctggaggccattatcctaagtgaactaatgtaggtacagcaaaccaaaaatagcacatgttctcacttataagtgggagcttgaattgaatacacatggacataaagacaggaacagcagacactaggaactgcttgagtggggaggatggaaagagggtgtgggtccagaggctgcctcttgggtactatgctccgtattttggtgacgatttgtaccccaagcctcagcagcacacaatttttcactgtaacaaaccacctgtaccctctgaacctaaaataaaagtagaaaaaattatcttgtaatattaacatatatatttgtataagtacatatgttggatattgtatgtattttgaaatatacatgtcaagtagacatgctgcctgaccacagggaaattgtgtgaacatatatatgcatcccaaaagcatatacattatgtatatgcatgtaatagttctccccttttttttgctttttaaaaaacttgtctcttcttatgaatttgtagtacttaagaaaaaatatctgacaaggaaagcaagcaaataaaattagatgaagtgtgccaaggaaagcaatcctaaatttcagagggcatgccacaaggtattcagatctcctccctctcctttctctctctccaccaaaaacaaacccaagcctttccctatgtgagatgaaggaaatctataactttgtgtattggcattacacagtgtcacagtatgaactcaaggtaagtgggtcatcttggagatatacacttgctgttttttcttttccctctacttccgtttttattggataatccccaaagaatcaaagaggaaacagatagctaaaggctcccacccaagctatgggctcccacccaagctaaaggctcccacccaacctatttattttatttaaaataaattttattttacttctttgcattctttatcaccaattgctacaggaggtctagaggaaaaggtgacagtttaatctcccatgatgttattctaattatgtttaacaagatgccaatcatcttgcaatggtttaatcatgatttatatcaaacattcttagtgtaggatgtctccctcccagcctttccctgaaatcttgcatcaaatcagttgagacttgacattatcttttcttttttaaaaagtttctttttttaaaaaaattcaacaaagacagcaaagggattactatattaatattacttggatgttgtatcaagtaggttagaatttgatgtactttttaaattaaaatttcattaacattaaaatttgccttgattaatggttttgtttaaaaagttgatctaacttaatgagatttcatgtttcttttttatatttctgaaaagagtatgccccaagaggaggatttacacatcttcttacatagcttttacatcactaaaagctgtataaaaacatcaaactttgaattgaaaggctgtacctaaaaatgacgtcatgaagcaaatgggtagaactggataggatatagtgctgtctttgtcttttgcttcagcagcccaaatctaattgttgaataatgtgctttagaggacagtagcctctttcaaaccgaaacattacagaaagttccacccaggcaatgtgctatttctagtcaagtatatggagactttacatgcagagagcagctgtaaagatgttgggataggagcaacttagaaaccagttcaaatagaaacttagacttgtgtccaaaatagctttatatgaattatagatgtttaatgttcagccctcctgtaagcagatatttaaaaataataaataatttttagattttgctcttctcattttctcctattaaaaaaaaccttggtgaaaccccatctctactaaaaatacaaaattagctgggcgtggtggcacgcgcctgtaatcccggctactcaggaggctgaggcaagagaatcacttgaacgaacttgggaggcggaggttgcagtgaactgagatcgtgccattgcgctctagcttgggtgacagagcgagtctctatctcaaaaacaaacaaacaaacaaacaaaaaaacttttgagttttaatggccaaatataatcctcagtttgtcagttacacattattaagtcttctatgaaatcatttcatacattctcttttgtgttttggccaggagtttagcctgaatttcaaattcagtgtgatacctacatttcttattgattatttgtataagacaaatagtaatcaaggaagttcatctgcattgtttgcttttgaattatgacttagttttatagaaaagaaatctgtaaaacattgtaaaatgagatccctaaaagggacgtattacagaaaaaatgtttttgacaatttaaaagctattcctttcagacaaaattgcatatatgtaaactattaacattaattcccaagcaaatcaagttttattaaaaatttttttggctcagtttgcataatggaactaacagttcatctacttagaagctgtacaacattggctggatggcccttcagtaaaatgcctgatgccttgttcatcctaaaaactgaaagtctggtgattatgttatagggagaagacaatcattttgatttctttgaatagagattcaactcggattatcttagcgaataacttatagagtgatctattatccaaacatctcctatttactttaattcactattaaccaaaaacctggggtttctcatcttttcctggttgagatttgatggcaaaatggcacatagtcttcccattagatactcttctctggaggagcaatatatttgtatctaaaactttgtatttatattgaaattctaaattggcatttttttttgaaatttccctttcaatttttccgtaagatggacctctctatataatttcagtaatcactggggctcagtcttcccagctatcagtgttattttcatggagagtggggagactatactgtgttatagtttagggttataataataatatacctattattatttcaaaatgactttccatagaacatccctacttgatattctaaatgggatcatggaaggaatctaagtattaaaataatatttctctttctctcaaataccactacaaagctaaatggtaatcaagagcatagaagcaattttgcagagattttgaatgatcattcaactgcacctcgatagtgagtggaacagacaaatgcagctgagcacacctctgctctccagcgacagggagtgaggtttgccaccattcaaacctctgggggcactgacaagcttctatttttaggtctgtgcctcctattggaaacatgctgcactgtgtgccctgtagaccacccagcccacccactttttgtggtttggccttctgtaaggcttgcctgcaggtgtgcccttactcacccaccgagaacaagctactctgccatttttctgaagtttaaaaatatgactggctaaaagaagacagtaagcaagtcgatttttatactgtcctggaaagttataattataaagtttggtgaacttcgtgaactttttcaagcatgtttttgccgcagacttgtgattgatgtggaggccccctggggcataggtaaagcagttgaaagataggaagttgagtgagctgtctcttgtacataacctgccagaggctctatgaggttaatgcatacattgcctcacccccagcccagtgcaatttgaaattagataaacattttggcaatgatgtggcaaaccgaaattcaaccttgcttttcaatagttctattaactttataaaagtaataagctattttttgtaaactaagctgttaggcatcaagagcacgctaaagcagctgtattaagtagaaaggaggtgatttttttcctgatgtaaccacactctaaatcttcacaatctgtcaaagcttgctctataattctaagccagcaatattcaaaatagcacaataagtactgttagcaagatgtggaaattttcttgagcagtaggaatgtaccccagaagtcaggatgtttgccgaccattagctctacttgcatgcaacctgtattggctgtcccttagggactcagacttatggctccaaagtggacaaatgaacacaaagtctcatgaacactcaaaaagagcttcttgcttcataaccctgtgaactatacagggcactcctttccttagtgaagcatcatatgtcttcataacttccttggaaacttttttgtagtaaagggaaaaattgaggctctattatgtgtcataacctgaatctgccacccatagtagagctttagagccaaaagggattttttttttcttcagatgtggaaatcagaacctcgggggctagtgactacctcaaggtcacatggtttgctaatggaggagccaagaccagaagccactgtgatctcacttcgaacatagccaaataaccacataagcacgaattacttcaaaaggaaggtgatttagtctgtcttatctggcacaaagtaatcacttactagatgttagttgttgttagagttatttttattatttttatttccctccctctccagatgttattgtgtttcacaacaatatgttttaagggtttatatggcttgtattcaaattttaaagaaaagatcttgtgtaagtttaggtctggggaagatctcgagagagcttctagtttagtttcataataatattgtccttcccacagtgattttttccacaataataaaatatctttttttagctagatcttgtgattttagctagaagatagtttgaatagaagaaaactttttaaagttcattttcagagtttgctgaaaaaattaagatcatctgtttctcttcccctctctctctcattcatacatacatactcccctgatacattatacctgagatctatatgaaaagctaacattttataaatactttgaaaactaattccagtgatgagttaatttaaagcattagatggatagcatatttaaacaagctgttcatgtaaaaatggaaatttttcttaaaaaaacattatttaaaaaaatctgtattatggaatttttacatcagctcttattactaagatgtttacataaaaagtgttccataaaggggaaaaattatgctggttgcacctataatttgctttgctccaaaccttggctatttaaactgcttccatttatgtgcacaaacctgaatgagttttttttatgccctcaaattaaaggcccgtttggaaaacttgagctaacaagcacacttatcctgccactaccatctttttcccaatatattctcccaacttattgggaaggtaagtttgtaaacccaaaatttgctctagctactaatttcaggtccttcacctgcaccacataacatggaataaataggaagcaataaccctctggtgaccatatgtaaagacatctaaaagaaaactggacatgaaaggaagtaggggctcagtaagttagattaattaatgaacaaactaaaatatggctaacatgctttgctatttaataacaaccacagtcacaacaacactgaaaactaatattatttaagcatcttactgtgagtcatgtatggtcccagtactttatatagatatctcattggctactttcatgtgctcaagaagttagttatgtgctgtttagccagtaatgacatcattgccttcatgggtattagaactataattagcttttatgaagctaagacattctctacttatgttggtagtgtttagcagtatttttctggttaatgccaacataaacctgttccaccctgcaatgctgcctaggtaatccatatggaaagattttctgtgacattctcatatgagatgaacataaggtgagtgtgtgtcttttaagtttcctgagtctttctttaggtataataaaagcagataagatcaaaatgagacaaatttttgatgaacataagagtagtcactttgctgcttttctgtcttatcatcagcagttaggctcacttcagtgaattcagtccttgtagaataagtctgccttgccactgtgactgctaagttatttccacaaactgtcagtgcagcttgctagcttttgtctttcttctcgtcatttgtcaggtccttagaattgggctacagtgatttttacaaggatctttgttcactggtagttttgtattgtttatataaaaaggagcaaggctttaaaaagtatctgtggctgggcccggtggctcacacctgtaatcccagcactttgggaggccgaggagggcggatcatgaggtcaggagtttgagaccagcctgaccaacatggtgaaatcccgtctccactaaaaatacaaaaattagctgggcatggtggcacatgcctgtagtcctaactactcgggaggctgaggcaggagaatcctttgaacccagaaggcagaggttgcagcagtgagccgagatcatgcaagcctgggcgacggagtgagactctgtctcaaaaaaagtatctgtgctggcctggtgcagtggctcatgcctgcatgcctgtaatcccagcactttgggaggctgaggtgggaggatcacttgagtccaggagtttgagagcaccctgggcaacattatgagatcccctctacaattaaaaaaaaaaaaaatatctgggcatggtggtgcatacatgtggtctcagctactcaggagactgaggtgggaggactgcttgagcccaggaggttgaggcttcagtgagccatgattgtaccagtgcactccagcctgggagacagagcaagaccctataaaaaaaaaaaaaaaaaaaaaaagtgctaaacaaaaatccagttattttaccttccccaaactaaaacctttttagtttccctactgctgttggtatactttcattttctctagcatggcttgcaaaatcctgcaaaatcttatctctgcctactttgtcatctttatctcttatttctccccactttacacacgatgctccagctgaactaaatcttaagttacttgaacagtctatgctgtcttgtacctgctgacctcactgcccaggacactcttttctgttttgtctctgccttcctcctttacttggctcactcccaaactgcatatttacatctcagtttcttgatttggttagaaatggtactgtttctatgaagtctaaacccaggctatagtatagcactgttctatcagagcaattatcacattgtatgatcacaatctacttatttatctgcatttccaataatccatagtcagagattatatcttgtacatgactgtattcccagaacctggcacagtgtcaggcagataaatgtttagtaagtatttattaagtgcggggatgtggggagatgagaagagacaggaagtgtgaacagagctaataaggagtgctgtatatgtcagtcaagggacttgtcttgttggatcccagagaagatttggaggtagagaaaacttaccttcatactaggatattgatagatctttctggtagtgatgtggaagatgagttagttgcaggtgacaagaatattgacaaggagaccaaacttttatccaagagagaaaggatgagaaccttaaactacaggaccttaaactgtgggaatgagatgaggagcagatttaacaactatgaataaaacaaatgtcatagcccttggcaaattatttgagatggtgtgggagaaagaagagagaagggatgttcagagtcctaatttgggtgatgttcatgctgctaacaattataaggaggataaaaacaaattatttgaggaatgatgtttggactgatggctctatgggatatccaagtgaagatattgagtaggtatttgcaaagctaggatatggtgctcagtagcacatgtatgtgatgaacatttaggtataatgaaggcttttgttcagatgagattagccagcgagaatgagtatatataaagaagagctgaacatagaggagagctctattagagtactggcttgaggcacacttggttgcaaccaacagaaatcgactaaaaccaagtaaagtagtagagcagcaggtataataagaattattgtcatataattctaggacaggccacaaggaacagctcctacccttcattactggatgtggaatggctggaattaaagcacctctgtttctcaaaagtctggttttctctcatctttgtgctctacattttcttttcttttcttttatttatttatttaatttttattgagacacagtttcgctctgtcacccaggctggagtgtagtggtgtgatctcagcttactgaaactccacctcctgggttcaagtgattctcctgcctcagcctcctgagtagctgggattacaggcatgtgccaccagtcctggctaatttttgtatttttagtagagatggggtttcaccatgttggccaggctggtcttgaattcctgacctcgtgattcacctcagcctccgaaagtgttgggattacaggcatgagccactgcgcccagcctctacatttgctctctagccccttagcttcctgtatttccaagtggccaaggcagctgctgcctttgaatttctataatgtcatcattcttctttttgtcattctctggttgtgtgtgtctctaacttgaaattcttagagaaagatagcatttggttgattggcaaagcctgtggtttggttcccttcaggtcaggcgtttactccttggaccaagtagtataaagatgacagcaagaggtgtgagaggagacagatcctcttgggagaagttgtacctaagaagattgagtagcttttgtagtaaactgttatttaaagcagtacttctcagagtttaacttgcttattaatcatccaagaatttcgtttaaatgcaaattttgtttagtaggtctgggttattctgtgcgtcaacaagctctcggatgatgcccatgctgcttgtctgagatcctccggccaaacagaaaggattgtaaaggcaagggtagcagaggtggtgcttggagagggctgagagggcaggaaggaaatgaggagaatggagaatttgtgggtaagagactgtccagaagcagcgtgtgctcagaggcatccagtgctggagaggatgagtgaaataaaaatggaagccactttagtataaacactgtgtgaaattttgtaagttcttatcaactgagttcagaggcctatggattcatgagcaagaaggtccgcagctggattaatccagagttgggggtttgcaggaagagaataaggaacttgaatgaatatgttaaccaggaggtagatttggtgatagaccatgcagtttatgttgtttcaaattattcattgcctttagattgtttttttttttttaaagctggaaaagcctcaaccattgcttaagagagaatagtttcccacgaaaatatgtgtgggtgtgtgtacatatgcatacccatgtgcttgtgtgtctaagcctcttgcaagtgatgtatatctacataacaggctgactctggaatgatttacaacagttcatttgtttggatcttcagaaagtattatcttttgcagtcaggcatggaatgttctcttgccaacatgattatggaaagacagaactcaaagtttaaacattaacagtattacagaagaaagagatgtgtttgagggtgtggtgcatgtgggtatctttggaaattcaaaaaattgtcagtcttaatggtgcctcatcaaggaaacttcagttcaacatcttgttcattttctagcaatgtcaagcttaattgaactgattcaagtaagcggtacccttttgaactcatgcttaagtcgttgaagtagctccttattcagggtgtttccaaagaacgttttggggttgacccattacagagggaaatgaaacaattatccggtttactcaggaaaccattgttttaggaggagtgtgtgaatgaactggtattctggcatgtctgtcagaagttctggtaggggattggaatgaccaatgtaaccgtgctttaagaaagaccctcctcaagtgtagaaatgctatttttgagtgcagagcttgaggaggagcggtgagggtggtggggatgcttgccaagtctgtcacattaacagaatcacagatgtcacagccagattgccttggattctatgccatcttgaaaaatctggatagtggtctgaaatcacttaaaataacttactttgatgaagtcgtccatttctgcatattatcaatcatttgataaatgccagcatctaaaatgttattgatattttacatttcaatgatgttacatctgacagcaatttacttagatctggagaaatggtatgtggctatcctggctctttactgacttaggtattagaactgattctagaattcatagttgctggcccttaggtttaatttttagaagccaccaagactactaaatattttaaatgtttttaagcaacaaatgagcttttcatgtgttagaacttaatatatcctcatggataattcaaataatgactgaataaatgcagaccaagcaggcaacttaagctaaattttctggagataattttcactgaccaggtttttctacaagctcattagctgcaattttatatatgttcaaatagagatcaagatttacttaaatgaattcattttgttcaccatttaacacagtctagaagaagcaattattcaatatcatccacaaatctgtgttgaaagaagctaaaattgatctccattttgatttatctcttgggatctaaaattcttgttttaaagagattttaaagaataggcatttggattttataaagaagtacttgtggcaaaggtagagtaagaatccaaatctgagattaaaaaaaaaacctcacaagttaatgattattaaatctatatcaaaatgttatttatcaattgaattaggctttggcgtgactggaagacttttcattatagattagagtttcattgaaaaataaacttgtaaaaatacgcacaagtaaattactgctaaatatttgtaagcataggcaagaactgagggtggaatttggtttgttgtttgtttggattacttgaaaaccttgcttttataattatatgtaagaatatgttaccatatctgtctttgagaacatattgagccagatgctttgagttgagtagcttttagaatatgtgttaatcctgattttaccaatacctcattcagtggctacttcagtaaccatctaattaggtagccctgactcttaagagagatcaaagtaattacttactaggctagctcatagtataggaatcaattagcagtgatatttgactactccaaattggaaaattcaaagcactatatttcatacttcctaatactctttattaaaatgtttccaaatgagtttcttaaaataggtttattttagggctatgaaactctttttaagaaattgtccgtttaaaaaacgtctcttaaagaagcacttgagctcaccgttttgttctgtattttttgtttaattgtggcaacttttttttttttttccttagaaggatactaggcttacattcagaagggctggtttgaattttggtgctactatcaattagatgtgtgactttgtgtgagttatccaatctatattagcctcatttgtttcctctaaagatagaggtggtaataattctcagggttattataatgttaaatgagatatatgtgaaagcttgttattgtgaattgctctataagtataatgaagaggatgatactgtgtctagcttaactgacatttcatctatttaagataattattatttagtagcactatctctaaatgctgtctagccactgaaggtaagaataatatggaagaatgtatcaaatgttcttctgaattcatgttatgagtgtcatctttatcttttttctatccctctgagtgcctaaggaaaaaagaaattctactaaagtggtgtgctattttacctctcttaaaattttaaggcactaattttgtgttatagtaattattaataatagccaacacttaactagtgctaactatgtcccaggtacaacttccaggactttccaatattaatccatgttatcctcccaataactctgggaagtggttgctgttattatcaccagtgtaaaggtggagaaactgaggcacagataaattaacttgttaaagattacacagtcagtgttatcagtcaaatttaactttcttatacccgtgggtaggcgtggtggctcaggccagtaatttcagtacttctggagccaaggtgggaggattgcttgagcccagtagtttgaggctgcagcgagggccactacactccagcctgggtgacagagagataccctgtctctaaaaaataataatgataataaattttcttaaaccctttcttcaggtcttagggaagaatttggcaaagataatatataggataaaggaagtcatgcacataacttgggtcttggatataaaggatggcatctcttcttggaaaaatgatgctgcctgtctgcatgttgcgatgacagaggttgttgcttactttcctttatatttttatttttaatctccagtgcctataactggataaattattgttaatttcctaggattacttctgtctcctgagcccaaggcaaagtaacacaaagctgaacttgtcagaaagtcctaatcatttcagtcctgtgctgtgagtgatataattggaagaaacagcccaacaccccacccaaagagatgttccagagcacatgtactctatcttcttttcagaattagaatttgtttgacttggttatactgcatggagtctttctttaatttaggcatggttcccttcatttaagctactcatttgttcataaatttagcaaattttattgaagatctcctatgtgccagaggtactgtgcagtgctggagagtagaatggcaaatatgacagtcacacaccctctgcttgttgagttcacaaagtagtggaagaagatttacaataagaaaatcatctcacaaatggaagtaacacaagtcctctgaatagtgctacaaagcagaggaacatggtgctccagggatggataagagaaagcatttggcagacacttgatgatcatcatttattttccattgtctgtcttcggtcttgtacaagatgtcagagacttagggaggaagagcaggaggagggcaagttaaaaagaatggatggagacagagttggcaaagtgaaacattgagtaatacaaggtggccaaagagaagagaaaaacctcacttgagctgtataaaacatcgaattagtccttgaataaatcaccatatcatagaagaatagtagtatttgtagtaactaccatttttcaagaaatgttattgtatatgcattctagtcaactcagtaaaagagggagggatataataaatttagttattttcattaatattttttaagtattttattgtttgaaagtttatgtgtccatttaatggcaatttatccagtattttgaataaatgagattactgccttcatttatataaatatgtaaaagcaatgtgaatattagttgcaaaagcatctctggacaggaagatagtagaccttggtttctgattccaactggtggataaataataattgagaagaacctaactgttctcattagtgaaaatgggataatagcatttcccctgtctacctcagaagggtttttctttacataattcattcaattaacatttattgtgaaccttatactgagaacaaatagtgatgagcaaaggagacatgatcttagatctcataggacttacattccatgggaaaaaccaatgttcatttacaatgggtcttaatttttccattcctgtgatctgcggtgctatactctagcatgctcatggcatgctccttcacatcattcagttggatctctcctcaaatgtcacctctttggagaaccagcatcgctaacattgatttcagtctctctttatcctttgctttacttttcttccccacctttatctgtcattatacttgtggttacctttaggtccaacactgaagtataagaattctttatccagccaggcgtggtggtgcacacctgtaatcctagctactcgggaggctgaggcactagaattgcttgaacctgggaggcagaggttgcagtgagccagaattatgccacttccctccagcctgggcaacagagcgagactgtctcaaaaaaaaaaaaaaaagattcctttatagagagattttgtctttgctgctcattgatattgatatatattatttagaatagtgcttggcacataatagactcacaataaatatttactaaatgaatgagtaaatgagatgagcccacaagcatataattaccaactgtgacaaacaaatgggataagtgaatgtattttcgaaactataaataatccatgtttgcaaggtgatgctatttatttgaatttcagaaaaaaaatacagtctgccagaagatagctcattatttttttgtattgatagctttctattaaattatttattttctaagagtttctcttcctttatatctatgatttgtaacattgagcactatctttatggttctataacccccgccaccccagttcagttaccctctagagtagagattcttaacctgggtcagtgaacctttgtgaaattcgctgttgcctcctgaggcctcattgtactccttgaaattgtgtgtaacgtgtgtggcccctgctcattttactggagagagtttgtataacagattctcagactgtataacctcccaaatttaagaatcattgcattaaaattttttgtttctcttttactttttgttgctctattgataattctttttctcctcaagagggtttcattttccatttattttttatgattgtatgttggtatttttaaatatttactgcttgattgtcgccagtgtgtggtattctcggtttattgcatgcatctgaacccagcccttctctctgtctctcttttgtctggccagcagtgtggggatgtgccaactgccgagtggttttgtccaacccttctgggacctttacttctccatgctaccctaacgactacccaaacagccaggcttgcatgtggacgctccgagcccccaccggttatatcattcagataacatttaacgactttgacattgaagaagctcccaattgcatttatgactcattatcccttgataatggagagagccagactaaattttgtggagcaactgccaaaggcctatcatttaactcaagtgcgaatgagatgcatgtgtccttttcaagtgactttagcatccagaagaaaggtttcaatgccagctacatcagaggtatgtaaaccaaaggcaacgccaaccttctgcttttatttaacatgttctgcagtaaacacaaggaccagaagacagagttatgctcttttatgtgaatgtgaatgattaggattgggatataagggcaagaatctgttaatattctctgagcattcttgttagcaaaatataattaccagatccaaaatgtggttacagtagagttgaattcttttatattgtttatatgtggaacatttaaaggctgcttggaagacactgtagatattccacggctaataattaaaatctataattctaacatctctccactgaaaatttaaaacatccctatttagacatcattttattttgggttttatgatgttgtccttttaaggaactatggtagggaacaaatacagaaaatgaacagtaaatttttaacaagctattaacagtttaagctaataaataacacagcttgaggaaagccctctgaaaatggctaactgaatgaaataaggcatatttttattaaatatgttttctatattctggcacaacataacatttaaataatctttctctctaaaacctgtgtttccctaaagaaactcaagcttcaacatggtgagacttagttatactgttttttttttcttctgtgccttctaagtaaaaacaaacagaaaggtacaactataaaaatgactattatgatttagttatacttttttttcttctgaactttctaagtaaaaacagaaagacacgactatgaaaatgactgaccctcactattataaattgtgttttttgattgtggagttattgatttgtgtttaccatggttaaaacacacatgcttaaatttttcaaaatattttaaatttttcaaaataatgttttaaaaatgataaaatataggacattggaaaacaaaaaaagcaaattagaattacctatacaaatgccacccagccataaccactaataaaatgttgatggagatatttatttctaggcttttaattttaacaatgcatgtagaatactggttcatattgtgtctctttgcataagtgaacctataaactgccttatatttaaaacgtaaactaaagtccatgattcctttaaattctatcatagatttttactagaatagttatactaaaacgatgttttattatagaactattcttgatgtactgaatattaaaatatattcaaactgtttttcatatgaaaccagtattaaaaagtatttttgaggagaaatacttctttctcaaattagtttcacaatggctattatattagcatagggctaaatctgttgtattatgtaataattttgcatgtatcatggattaggtgaatacatttttattttgaatttattgcacgtctattacaataatagtacttgctatttattgctgtggtactggcactgctctgtgccttggacatattaacttatttaattcttattgaccatatatacaataggtgccattgttgcccattttacagataagacaaaggtagagagagatgaagtaacatacccagggtcacatggccactacccagaagagctggagtaggaaactccatggtctgccctttactactcaaaaactggcttatatgcctggataccttaaatctccactttgtttgacttttcactagactccctctccttaatagaattatttttgcatttgttcctaaaacagcctgatgatggtggaaaaaataggaggatatagagtaactgaaagggagatggcagtacaggaatgtttggaaagagtgaaaagtaatcattaatgaaaataagaactattatttatgtttagaaatcatttgaaaagtagtatttttgaaaatcttaatgtataaacaaagccttcctgaaaccagttatttccttaattaggtagttggggtttttaaattgttaatttcttagtttcaggattaaaaaatacttatcaactttgctggctgtaactcaaaagtttaggtgtgagatccaatcatgactagagatgaaatgagtagaatttcttattattactgatatcagacgattggtaatgggctggtgacagaggatagatgagtaagaggggagggatggggcaaatggtaggtaaaaagttaactagtagaaagcgatggagggcttgatgttttgcatcacattagtctgtgttctgaagttaacaggtttatctttcttgttatgttttgtcctagttgccgtgtccttaaggaatcaaaaggtcattttaccccagacatcagatgcttaccaggtatctgttgcaaaaagcatctctattccagagctcagtgctttcacactctgctttgaagcaaccaaagttggccatgaagacagtgattggacagctttctcctactcaaatgcatccttcacacaattgctcagttttggaaaggccaagagtggctactttctatccatttctgattcaaaatgtttgttgaataatgcattacctgtcaaagaaaaagaagacatttttgcagaaagctttgaacagctctgccttgtttggaataattctttgggctctattggtgtaaatttcaaaagaaactatgaaacagttccatgtgattctaccattagtaaagttattcctgggaatgggaaattgttgttgggctccaatcaaaatgaaattgtctctctaaaaggggacatttataactttcgactttggaattttaccatgaatgccaaaatcctctccaacctcagctgtaatgtgaaagggaatgtagtcgactggcaaaatgacttctggaatatcccaaacctagctctgaaagctgaaagcaacctaagctgtggtgagtttgtagcgtattcctttttttttttttttttagcattattctatgaatatgattgtcaacaaagaattatacatacacacaaatgtacctgtatgtatattcacacatatagacatatatatatatgttgtcattaaaaagctcttttaatttttaaaatgtcgtctgctcagctcttatagcacacatttgattataagccatgcatgctccatcaagacatttggttttaccattcttaagttttccctatgtcataaaatatcacagagtttatcacgaatataacaatagttataattgtggaatctcaaatacaaatgttaacactaggcttgaaacaaaagaaattaataagtaagttattggtattttttttttgagacagagtctcactgtgttgcccaggctggagtgcagtggggtgatcttggctcactgcaaactctacctcctgggtttaagaaattctcatgcctcagcctcccaagtatctgggaccacaggcgtgcaccaccacacccagctaatttttgtatttttttaaaatagagatggggtttcatcatgttggctaggctggtctcaaactcctgacctcaagtggtccacctatctcagcctcccaaagtgctgggattacaggtgtgagccaccctgcctggccagttactgtttttttttgtttttttttttttttttgagacagagtctcgctatgctgcccaggctggagtgcagtgtcatgagatctcagctcactgcaagctctgcctcccagattcacgccattctcctgcctcagcctatcgagtagctgggactacaggtgcccaccaccatgcccggctaattttttgtgtttttagtagagatggggtttcactgtgttagccaggatggtctcaatctcctgacctcgtgatcggcccaccttggcctcccaaaatgttaggattacaggcatgagccaccgtgcccggcccagttactgtttttaatcacaaaggtgatacagtaataaactgatctatatcatcctggaattaaatttcaattggatgacttaaataaacaaccagcacctaagagaatagtatttactcagccagtttaaatatcaaaactgtccattttatagaaaatcttaatcaggaattatccatttttttctttgaacatttttctccattttttttaaaatgaggatttatagtttgtttcaaatactgtgctgtctctggttcttctttgtgagactgtaaatgtgctattattggaagtagctaaatgcagaatattttgagaaataattctgtgtgataaaaattgtattaaaatagatctccacctaatattctccatttacacaagttaattctggaagcctttattttattataggactgattcaaacacaaaaagtagaagtttcattatcaactttaaatgtcatatgactaaatctaaggcagtgataatatatacattttagtcacagacataactctcaattaaaaaggagaagaaggagcctagtattcaaaagtaatttgtatatgatattggagggaagtttactgggaatttattcccacgctttgagcaaagtagcacccttatgatgactcaaggccacctcccaatttctcagacccatgcctgcccttctggcctgagaactcctgttacccacctgttcgtgtggtccatggcactcctacaggtggtggaaaggctgtgaagtgatgtcatttgaaagatatttccttgcaggatgttggaaagtagataaaccacaaccctgttccacaagggaactgcagagctttataagagctggtgatgttccctaagatcttctctcagtgttaggatagctagaaaggaccttcagggactccttgagaagtcttttatcagagaagaaattgagaaagtcaggtgtgtatgtttggtgtgggacagtgaagaataaggagagggaatggtgcacttcctgcattctgggtgactgtctttaattcaggggtctcttttcaccatagactgggacattattaagaagtcatagtatagaccattctaatatttgcctttttatgggacaatgttttgaagatgtcagcaaccaaaacaaatatggctatgttaataattgctaatacttatatttaaattgaacacacattttgtactaaatgtcattttaagcacttaacacatattggttgattacctacaccatagatcccatgttacgggttctataattgatcctattttgcaaataaggaacctgaggcacgtggagattaactaacttatccagtgtctcttaattagtaagtagccaagccaggattggagcttggaaagtttggtattagagctgtgctcttctaaccagtataaattagactgtcattcatcataaacaggattagatattagatttagtaccaggataggctaaagctcattcttgctcaggggagaagtatgaaggtccaagagccatctctctggccagcagtgcattctgtgagaaaacactaggtttgcagtgtgttaacatatttgtttcaaacaaataatatttgtttcccacaatacttcctggatacctaactatgaaaaagtatgattcagttttacagggattcctaagcttctctaagaatttctctagaccagaggttggcaaattaggagggcctgtaacaggccatgcatttttgtttacttgtttgtttagagacggggtttcactctgtcccccagggtggactgtagtggtgccatcagagatcgctataaccttgaacttctgggctcaagtgatcctcctacttcagctctcctgagtaggtaggacatcaggtgtgcaccaccatgcccagctaattttttaaaacatttattgtagagatgaggtctcactgtgttgtcaaggctggtcttgaactcctggccccatgtgatcctccctcctcagcctcccaaagtggtgggattacaggcatgagggattgtgcccagcacacatgtttttttaatacttgtttttctttttcttttcttttttttttttttttttttttttaagttggggtcttactgtgttgcccagactggcctcaaactcctgggctaaagcaatcttctaatctcagccttctgagtagctgggactaagctcccttgttcttataaataaagtttaattggaacacagccatgcccattagtttatatattgtctttgtctgcctctgtgctacaatggctgtgttaattgattgtgatcaatacagtatagcctgccatcctaaaatgtttacagtctagccctttaggagaacatttgccaccccctgaaactagtctaaagaactgagagtccgctttgctgaaccacatactttggacagcactagaaaagacctgctagatctcctcagccagggaaaacaaaccaatcacccacaggctagtttagccctacgacatgggtggtggtagtagcatttatttgttcctgttcatttacatttgtttcacacagtgcttttaattgatgaattatttccaatattaaacaattagatttcacataaaaatgaagttttggatttttctggtaaacagaatacactaggctactatatctgcatggccaacacagctggagctaaatggtggctgctgctttcaaaggagcttcccagtttactttagcccttagcaaccccttattcttcccactccagccccctttttgtctttagatggccatctggccctgatgggcttttaaatgggaatgctgatttatgccactccctttatacgggccaggaaactgaagcttagacaaaaaaaagtggcagaggcagttggtgggctccaacacgtgtctcctgtctccttgtctagtatttatgtctgggaatactcatttaaaaaattattttaaattattttaattgattgataagaactatatgtgtttatggtatacaacatgttttaatataggtatacattgtggaatggctaatatgagctaattaactttcattgttatctcatatacttatcattttatttgtagacagaacatttaaaatctctcagcaattttcaagtatacaatcattgttattaacaataatcatcatgttgtacaatagatttcttgaatgtatttctccagtctaactgaaattttccatcctttgacccatacattctcaactcctgtgccccatccacccctgtgcccctggaaaccactcttctattctttgcttttatgagttcaacctttttaggttccacatttaagtaagatcatgcagttctcataatttcttaaactctgtccctgagactcctttcccaagccttaagattatcggagtgcatcaaatacatactcatgtatcttagtcatctataagttttcaaagtaattttgtcaaaagggtaccgtgaacttaacggagtcaatatatttgagtctttctaacttttatagtgatcttcttgccattccaagttgacgttaaacactcacattccagacattcagatgtcctggactgtgtttcaggagaaatgatgggagagggaatttcctgctgcttaatcatcagctttgggagttgaagagtccaagtcactcattaactgacaggaaatacctgtaaacagagattatatcaaggcttgttagctaagcaaatctttgataagtgtaccctgttaacattttaacctttcattttttttccaggaaatgaaagcatcttgctgtttatggttataatttccaacaaactaatcagtacagtaaccaatgggagaatagaaatttatttctagcattccactgaatggacaatgtctgctaaatatgagcttttatttcaggattaatttgtgatggaaaaataaatagattttgcaaaggtatattgctaaataaattttagtacgaaagtaacatagtagaattgaactgactcaattcaacattaaaatatcctgtcatttttttcacatattaaacatcctagccttaataaaattgatatattattaataaatactctaacgattttagtatatgactttgttttcctatacttttctaaaaaatatttgggaattttaccttaattaggaaattttcagcagatttttaaaaacatggttaaacctgtcaatacttttaaaaacgaaatgtttatttagcagtaaatctgcttcattttatagcatcttcatttttctcataacaattttattaaatacattcagttttatgaccctcatggatagataaatttttagtggactctttaattataggtgcaagtatttatttgcctgtgtaatgattcaagtttagatactggctgatgtccgtcaattttcacaaagaacagacagtgccttctctactagttttatttattttactgattactactctttcctgagggagtggtacagtataacgcaatgaatagtctaagttcaaacaaattacatttattttaacaagcatttattaggcacttccattggttagctactgtggttgtagagataagacacacttcataaatactttattgttattcttttctgaaatttctggatttgtatttttgtttccctctctaggattttttacagagtttgctaaggtttcatcaactcttggatttttaccgtttcataatcattacagttctgttcttcatagctataaaacttcaattcattattggctcctcccttgcacttctaacaaatgattgaatgtaatatttttagattactaaatcatttttaaataataaaattaagataaatcattttatctttgcaaaggactttatactctgaggatgcccaaactctttatgaacatagatgactaaatttcactttaaatatatttatttatgaaaagttgaaaaattcatcttagtagcaactgcaaagaaaaaaatgaaaggaattactgtttttatttttctgttattgcaacttattgtgaggatttgctcttcagttatttggagtatcattaagtaggtatgagaggagcagtgggctacacatcagtcttttttaccacaacttgtgtaaatattaacatatagtgactcctttcagtagcataatttggaaagtacaacagatagagaaggattaacagctttagagcttttcctcaactgcctgtttccagtgattacatttttttcaagaaaacttggctctaaatgttgctgttaatgttgtagaactttgcttcttagttcagctagaacccgggttcttgtcacacaactaggaaaatttaggcacacggacacatcgagtggtcagtagagcaggactttattgggcaaaaaggaaaaacaaaacaaaaaacaacaacaaaaagctcagcaaagtgagacggaggcctgccaacaggccctccacctcactgattgattcccaggtccccacaggagctggagagagcagcctcctcccctgcataaggcatgaattccccgtggctccacccacctcccacaagtcgggctccagtcctctatgggcaggctcaggcaaggcctgggcaggtttcctcatctgcacgaaagcatctgatgtaaacacttgtggggcgggtgggagattctccgggcgcccctttttatctgcctagacatttggctgtctcattaatattaagtaaacacctgaaaacacctttctggtagcctcgaaaatcagtgaacacatacacatcatattctaaaaccaatttgttgatgataaaacatatcattatccaggagagtggattgtttgttctttcttaacaacctcctgatgtgtaaatccatcagccaaagaaaactgattgtgatattgactttttatgcagatatgctgaaaatggaactgggtagaaataaagtttgtatatacttttgatagttcatgtatttgtttattttggtgtgtttgtaatgcaagttttcatttatcaattaaatttccttttaattaaattagtcacttgtatttataccatttttacttaaaaatattccagtgtgatttttattgttatattggatcatattaaaatagtgtttattgagtgtttaaagcaatgtcaatttgctaaactagaagttccccagaaggaacagctaactaaaatactgagaagtaattgttgcagtttcccataaaagaatgctacatattgaaatttatacttgttactgtgcaatgaaactgatgaaatgttcaagaaaattgttaaatatcttgctctaaatcatagctcttctgattttcttttcttatttttacctctaagctctttaacatactgggaatgtagtttgcctaaaaactgctttcccacaacactgagcccttatctccctttgtcttccagagatattgtatcagtgccagaagtggcctaagaagcccttgactgccaacattgtgtgtaatatgagaaccacaggaactccctccagggtctcctctattgcatgctacagaggctgagatttcattagtctctgaactttaaaggctttttagtttgcggaagtcccttacaaaatataagtacctacaaaagggaggtcctacaaaaaatgggcatacagtaaatgtgatgcaagggaataatgggcaaaaagcattcaagacaaaattccacctcagtcctgccttaacttctgcctcttcaaatgttcttttttcattgtgcatttgcttaagttttcaatctttaaaactcccccttcctctctctgcttcctttcacagccaagcttcctcttcttgcattcactcgtcagaccttggcagtctagatttcatcattcccacacaactcaaactattttctatagagttactaccaaaatcccaatgcaaagttaaaggtcttctcattctttataattcttggcctttctggtattcttgatattgtcacaccctgcattaaactttcttctcttaaattatgtaaaaccacctctgtaaaagctgtttttacctttttaagtctatagctctttttcttatatctgatgcttaaatatagaaatatctgtggttccatcctgtttccttctcaaatctacaatctatctccagtgatcccaaacactctatagcttctgatgagtatttcctggctacacctcttacaaaaacacttttgcgtctaggtgtcacacaggcacctcagtttccgttactggacttagtgtttaccctaccccacctaagtctgctcttcttctgttatttcctatctccttttattagatcgatatgtaccagtttttgaagttggaaattagcaaaacgtcctctattcttccttttttcctctgtctttaattagttgctaaatgttatgcattctatctttaaatttcttgtatctgtatctatctctttctgtcaatccttattacttatgatatcaaggctgaattattagtagtagtcctgcttctgtttcccttcttttggttgtagaacctaaatgattgttttcaaatgaaatatagtttacttgcctacctcctcattttccctcactgcctttaagaaagagttcacaggccgggcacggtggctcacgcctgtaatcccagcgctttgggaggccgaggcgggcggatcacgaggtcaggagattgagaccatcctggctaacatggtgaaaccctgtctctactaaaaatacaaaaaattagcctggcgtggtgacgggcgcctgtagtcccagctactcgggaggctgaggcaggagaatggcgggaacccgggaggcagagtttgcagtgagccaagatcatgccactgcaccccagcctgggcaacagagcgagactccatctcaaaaaaagaaaaagagttcacaatgttagttcacctggtgaacccaaaatatctgagacaggtttcaattagtttagaaagtttatttttccgaagttaaggacacacccgtgacacagcctcagggggtcctgatgacatgtgcccaagatggtcagggtacagcttgcttttatatgttttagggacacaatacatcaaccaatacatgtaagatttacattggttcaatctggagaagggtgggacaactcaaagtagtggggagagggcttccaggtcataggtagatttaaaatttttctgattgacaattgattgaaagagttattatcagtagaaaggaatgtctgggttaaataaagggttgtggataccaagattttttcatgcagatgaagcctccaggtaacaggcttcacagaggatagattgtaaatgtttcttatcagacttagggtctatgttgatgttaatgctggaggggtgtaatgaggcatgtccaaccctctcttccatcatggcctcaactcgattttcaggttaactctggagggacctcggccaagaggaggagtccattcagatggttgtggggggccctagaagttcatttttggtttacaatcttgagtgcccaccactcaaggttctagtgtgtgggattaaccactggaagaaagacagagggttctagtgctcatggtgttgctattttccaaagccttacagcagctatccattgtttgtgtatctgatcatccttatcagtttttactttactttagcaaagcccagtgacttgagtgcacagaccgtctcagtgcctccttggtacttgttttagaaattctgtctgccagtaaaatacccatctctactttcttacccctggctctctcacagcctcctgtgcctcatgggccttcttctttgaaatggattttctgttcgcttttcttaccaagctgctgtcacatcctcctttgggccactgccaccttcggagcacttccctaatagcacttagaactgtgacgccatctccctttcatgcctccctgagagcagcgacttagcttaaagcatcattctggcctctgtacctcacataatgtaggcaataggtaaatgtttgttgagtgaatgtgtaaaggtctgtgacaagagcttcttgccagtcagtgtcatgtcatagcctgcctgtaatatcaggcctttctgaagtatcatgattctttccttgggtcaagtgccctgaggtatcaaggatgaagaaaccatgcctctggagatactgttaaactgttaggttattttctgcttatgcataccgtttacctagttatgtatcttttgttagctcatgtgcgagctgtgcctacacattcccacaggaaagttttgaaatatttattagaataaaaccactattatataaatgtcccttaaaatatcgtgcatattatatatgtgtgtatatatatgtgtatacacacatatacatatatatttgtatttgtgtgtgtttatgatacaatatgctttgttataagcttagccaatttttctcagactcaagctgttggaaaaagtctgttaattgtcagagggagatttagtgcaacaatgaaaatctacttctactaaaaaattagctcaaaacttgtttcctgctgaggatgagttagtaaaagcttgaaataaaaagacacagagactgaattgaagtcacagaaacatatttctggaattacaaatagcatatgctaggatgtatgaaccaaaactgcgttttatgggtaattcatattaacttcacttttgaaacttattcttgatgtttgtattattttatttgtatgaattcccacccaaactcttaaaatttattatacaaaaagccctgaactttttgcacaaactttaaggggcagtggcactgcttttcttttcatgtgtgatgactcacaagttgagttaaagattttgaggacaatatcaatactttggttttacatttgagaaaattaaggcacagtggccttaagagactttcttgatatcaaagaattactggtggactcttctagggctgcttctattacatcaaccgtatgatttttctggataatatcactaaatcataaatcaaacttacatattctttttgtgttgatcaaggttcctacctgatcccgctcccagcagcagaactggccagctgtgcagacctggggaccctctgtcaaggtagggagcccacaccgtgctctggaatctctttgctttctacttgcaattttgggtaatgtggttgtcattgttttgatttgtatctgaattttcacttggaaagccagaaaacagcaaaacagaagaatttctgcatgtgttttagttgtgtgggtgcacagtacgtacggcatggagaaagaatgcattcacaccatgggtaaccacaattccacaaagctctgagttttaaaaatgtgaatttatatcctattaaatatggattggtttcatttttcccccatgtcttctcaagaatatattggacttgcaaaaagtccagtataaatacagtggtacaatactttgaagaagtattcatgtctataaaataaagagggaaattaatttgactattcagttaactttaagataaggccatgaggcaatttatgatgacaagataacttaaattttaagattaaaatggttatagtgaactaatgttaatgtaactgtgttaattattacgatgcttactatatcgtggtcagtatttcagttacatgttatgtactaaatagctgcatgctaaataatacataattaaagttatacaagttttaaaataataatataaatattttgctttattttatcattgctcttcctaattatccatgacccttttcatctatttattctattaaatacttctatagtgaagtagcatgttctgtgtaccacattaagaatcacagccatgccttttgtaaaagctggatctcttattaagaagatcatagcacaaaagtgacagggcttagaagtgagattgaagaaataaaaacctaagctctcttctgtggttccagtgtgagagtagggcaggcaggaggtggggtggggtaactcattattatctttttttccttttggagacattatttctttgatattattattaatcaataccctatgaaaattaagtcatcaagtagtttttttttccatgatctccatgtggttttcaaattgttatatgaaataaaaaaatctgtaattctgtttagttcaagatctgaagtttaaaaaaagttatttttatttttaaaattcttctcacctgggatatctgacataatactttgaaaatgtctcccttataaagcttgccctgtgaaatactttttatccatcaatgtttagtaaactttttggaatctttaaatgattaacttagtctatgcatttcatttgtctttttctttacattcatcttaagaagaagtacatttttcttctgagattttatttctctagtctcagtgtattaggcaaacttagtttagataactttcaagctgcagatctgtacaggctgctttctataactttttcttttgacagactcaggaaaccaagttctagaagggtttagtgttttactgtgtgattgccagcttgttaatggagatctaggtctagaatctagaatcaaaatgtcctttctctcatcactatgtgcttgctccagacccttgtgtattatagcatcaaaggccatgtgtactgattcttaatgtgccatagaaagcattgcttcatcttatacattacaaccttggagtcttttgtatttcaaagtggtttccattcttcccctatatattttaatgcattaattatagattgcttatccaaattaactgtcatgtgctctttgcaaaattacatctttctcatctttattaccagctactgtaaactctcctagtactacaccacccactgtcaccactaacatgcctgttactaacagaatcgataaacaaaggaatggtaagaaatcattaccttttatatttttagtatgtctaacataaaaaattgtattctaaggatggaaatatgtattattccaacaaagtgtctgttactggagtcaattggtacatttgtaggtttacaagattagtaaaattaataaagatcacttaactctgttgagttcctcattcttatgacgagtggaatgagtacatctccagtactcctcttttgcgcttttagccaaaatttttttcaaaggaagttttaggggaaaggcatttaattagaaggcattaatgtgcatcataatagagatcagagaaaaacgtatttccatggtattttgtcagattatttgctgcaggaaacaagttttaaaggattttataaatttcaaaaaattaagtaattttaataatttaatttctcacttaagtgaactttatggtcatatatttgtgacatttacatcaatgtccatagtaatactttgctttctgtttttatttgccgaagaataatagaatatgattatatatcaactaaaacaaatcaaattttgaatgacaacttcaaatacttcttgcttttttctccaaatatacttttctattatttataatttgcaaatacagcagtgtacggtaagaaataaacagaggaaaagtcaggtgagtggaattctttaacctgttcctagatgaacgacatacatggcctttcagtaattcacagtgagcaatttcagtttcttctaataaaagagaaattccaatcaggtgaccacaccattgctttgaatacagtaatattctcaaatatgaagcattagaaacaaaggaattttctaaactccagtcatttagcttatgaggccaagacatctgtaatatatcaccagggacccaaaaccctgagaaaagaaacccacatagttcattttttcttggcttcagaggttacatcaatttcctctgtaggacatttaaattggaactatggaatattttacatgaaacatagatataaatttcagtagggttataaagacatcgattcagatagtgtttatggttattctgatagttacaccaaggagatttatgatggagcaaaaattccagcaacccccaagaaagcaacagcagctgaaatttccagtgcatatttcacatggactctagccagtagatgggaatattataattctaactaagtatttcactctttgtatgaacatacaaagagcctctgtggtattctccctccaggattgacacatcctctactgtccaagaacatttatacggtgcttcagagtccttgacttggtggagtggagctgtattcactcaatcatgtcatttctgacattcttgaagaaagccttgtttaggccatctctctctgcgtcataaccttcattggagttttaacaaagcaagcaaatgttagaatcagttaaaatggtctgtcttgaccacattaatgaaaaaaatctaattcagataattcttaatcaaaatgtcatcagcgtttaaaaatattcaggtcattatatgacagaaatattctcaaaattgtgttctcaaatttgtgtaccatcttaacaattgttatttttaccatgtctctgaaccacctatactatttactatgttttttttcctaaattgactcactttttaatgtaaacatttgtgtttacttgggaaaatctatttcacaattgtaaagtgaaaccagtcctacttgttataacacagttgtaaaaagtgaatataaatataatgtaaacaatgttttaaaattctccctgtatcctattgccttctcacatcttagcgcctgaagcctttattatctttttaaaaaggaagactaacaaagtattagagacagactatattaagttttttttctttgatgtaatcaaatttgaaataattgaaaagagaattactttttcaccttatgaatacatgctatttaatgtcatgtcctggattatcatcattgatataacattaataatttcttattctttgggaaacagagagtaaagattctcaggcttacattctgatatattagagaatactattttatttactgtaagaaagattggcacaactgtcaaatctattatctaatttgtccattccttttaactcttggctatcagaattttactgaattaatcaataacaatattgcattgtggggagaggagaggggttgagtttgcttgataatcagatatatttatcatagtatatcaatagaatttgttttcctggcttttgtgaaatgtccctgtttttctgtgtgaagttatttttgttgtttgcaataggacttttatctgatacctcaaattacactaagtcctcattaatgtcattgataggttcttggaaattctgactttgagtaaaataacatgtaatgaaaccaatcttaccataggctgattgatataaacaagagttaagttcctacggcatatttctggtcacagaaacatcaccaaacttccaaataaaggccgaaacacttctaatattaaacattgcagttaatatgagctgtacatacatttaagaaacattagtgaaaacaagtaagataattgattgcccaattttgggtgagccagtgagtgactgcagtcttagtggcggtggtgggttaaatcaagaaacaaatttttgcacaatgaaaattgtgaggagcacctcctgccaccaagcagttccaaaacaatcaccaatatgggggtttgccgagtgctttcatactgtatcacttattgtcgtgcatttatatgattatcttatactttatgaatttttgttttacagtaatttgtagccattcattcattgactttccaacctgcttattccatccagttcagggtagcgggtggctggagccatctgggcagctcggggcagcaggcagaaactagccctggccaggactccatcccatggcagggcacactcacacacacccacacccactcacactgggaccatgtagacaggccagtgaatccaaggtacacagctttgggatgtgggaagacactggaggacctggagaaaccccatgaagacaaggggagaacatgcagaccctacgcagacaggggacctggccaggcattgagtcgtctcctcatcaactttgtaatgaagctctgttgaatgaaatgatgttactcaaggacctgctgtgtacactaagaaagtctttaaagctacttttcacaaacagatatttcaggatatgggtaatctggggattcccacaaataatgatcttttttatgttttccattacattcccaagaaaagctcttggactaattattattccattccaaatcatatcttctctgctcaaacatcactagctactgaatagtaagcttttgtgaggttgtcacaagcaacccaagtaaggaattaactccattagtctctattattgttctaaaaacctagtttacaagtaagtacagattgtaacactgcttccagtttctcacatacgtttagctgcttaaataacaaattccttctaagatcatttgaatggatccattactctagctttttatgccatatgtcttaaagaaattgtgtatgtaggagctgcaggatgccagtcatattgtaaatgccactgtcgtaatagaattgcctcatcactagttcaaagaaataaccaggtgtctagattagcatttggtttatattttaacgtctattttttcaaataggcctatcatttcaaacctgtattttacgtccttgaaatagcatagatagagcagtgtcatttctgtattctccaagaaactctgaaaaaagtgtaagaagataaaaaagggaaagattaattggagagagacctacaaaaaataatgttgttttgatacattggtaatggcagacagtgatttctgcttgaagttctacatgctgaaagaagtatctaaatggaaaatggatatattcttaaatcatttttccccaattaatgtctataataaattctttgggcctagatgtcattattaggatagtacatacatattttgaagtctctggaacacatgaagatttgtgaatagcttttaaaacaccgtgagtgttgttaacatttgtaagagaggacaactttactgctatggtaacatggaaaatcctgcataagtgtgtcttaattatgcatttcctccaatggcaatgttgaagccaattattttgctgtagtccaaaaccctgctcatcagcccttcagtgggcatatttttttatgttgctttgacagttcactcttggacttttctcatggttacttgttgactgcactattccaaaattttaaataagtataacaagtggactggggcaggaaacaatgtttaaagaaaacatcttaaatatttggatgctttcttaaaaattcagaaatgtcaatgatttttagaattttgcaatattttccttagagggaacaaatactactgttataacaaaagcatgctttaggtttccatctagtggtggcttttcagatactctgctagcattgataatacagatgctcctccacttacggtagggtttgcattcctataaacccactattaagttgaaaatactggaaaatatcaaaagtcaaaaatacatttaatacacccaacttgctgaacatcatagcttgctgaacccaccttaaacacgttcagaacacttaccttagcctacagctgggcaaaatcatctaacacagagtctattttataataaagtgttgaatatctcatgtactttattgaatgctgaacttaaagtgaaaagtgaaatggtcatatgggtactagaagtacagtttccaccgaatgcctgttgttttcccaccatcgtaaagttgaatgatcttgaactgtaagtagggaagcttctgtatagtcacagaatattatcaggatcctgaaataactctttgacccttgcaattctgaatttcctcccaatcattcagaacatctgtgattttatttgatgagatccacagtgtaaaagttatctttatatgaattatttgttttatatgttcctccaaatatttttcattcagaacattttttaaaggaatataaaagtcaagatcattaaaatacccgaagaattttagaagttgaaatagtctgcataaattaaactcacctgtgcttggacttgtgccagttttatatatttatattactacatccaggggcagcaatttatattgtttagcacaagactctgattcttactggaaagacattcctttggtagtgggactggaatttgcattttggtggatttggaaattcccagaggcaaacttttacatttttttttctactgcctccccacaatttttactgttttcttcaacattgctataattatgtatttctatattttgtgtgcctattttacttaagacttacctaaacataagcatgaagaaagatgatcaacaaaggagactcaaaaaattttcttctctctgtatcttaccataatttaaaagggtatttttcttactagctactttgactaaagcacccatttacagctatttagcaaacccttgctggtgagtttgatttttcattttaaaaaatcagtttactttaaagattccccccacccaaagagcagaatcttctttacaataaggttttctttttattttctttttcaagtgatttagtccaatgaaaattctacctgcaaatattgtttctttttttccctctattttggtataaatgagcatatttaagaaattttgatgaaaagtctggtgaaatgcagcctagtagtttaatagaagtattttattaagcaggggaaagagaggaaaaggagaggaattagggtagtaagtatgtgtatgcctgttctgctttttcaagttaattcctccatatgatctcattcaagttttcacatcccaaactctttatcattctttataatgcacagaaagcataatgcctgttataagaagtcaaattgtacatgaaaacagttaacacattacagacagtagatataagaaatctatagaattaaaaatatgaagaaacatatgcaagtaataagagtaagctaattgataactatttctaagaagttggaaggtcaataagcttaacatcaaaatatttcagaactttttttgcctatgtagaaggtgtttcttttaacttatattgtaaattatgtgattatgaataaaactatatgattatgtaagacttacatgatcataactttaaattgtttgataattatataactataaacatataattaatggactaatcctatttccaatgggcagatggaattatctatagaatatccgtagtgattcagaacatccttcgtcaccctgaggtaaaagtacagagcaaggtggcagaatgggtaagtgagcttgtaacttttcttttttaaaaaaattctttaacttctgggaatctggaaaagactagttaactgaatccacagatcatactgaaacacagatggtattcattagaaatatatgagtagatatgtaagtgaggtgttgtccttatgcataggaagagaagtacatttgaataaaggataagaactgagcctaatagactatcaatgtcttaaataagaaaagtatcgcacaaatggaaatagattttggtggcaacaggtatctgtatttcatattagatccatgtattttctgctatatttttaaatagattattttaaaaattgtttgaatgtttgatcaaaaccagcaagtatgaaaagacgcattatgaaagtcttccacccatccttgctgctcatctgcatggaaccaacccaataaccaacagcaaataggaaatcactattagttttctccgcttttttccagatttctttgtgcacatgaaagaaaattaaactatagattcttattttccttcttttttacacgaaaagtagtatactttacataccgttctataccgtacttatttttattgttgccagatttgcaacattagagaactacatgttttttttgttttgaaaaaacaatgcataatatttcattatgtggctgttcagtcatttatttagcagatcttctgttgatggacagttaggctgtaatttatttaaccagtatcctattggtaaacattttgtagttttcaatttaaaaaatttaacattttattttcttctttttcttacaaatacaacacatggattttttcattttcttcttcacaataacaatctcaattttattttccataggtttctattttttctattatttcatttcctacctacagcatactgtgagactttgtacttctttttatatataatgctgttacagttcaaacaatttttttaattgagtcactatacattctgaaataagaaaaatgggttttcatatatatttggtgtttgataaacgtgtctttggtagcaaaagaaagtttacgcattgagaggaagtggtagctacacacacacacacacacacacacacacacacacacacacacacagagacatctatatatatttgaaaaataactgatagaaaacagtcttcattttaaaggcagtactctttaaaaaaaagttgaccataggtaacaatagtaggtaattaactctgttacaaagttggtgagaaaggtgaaatcctctactgaaataaaagaaaaatactacgtttgatttttgggaatgccacattgagattagtaactcattcaaatactaggagatgtttaacctctcaatggagagagcaggctgcagaaagagtatattctttctgtgtatcccattttctttccagagttgttctttttgtttaaagttagagtgatttcagaagataaaattctttattttcattctcaaataagctactgttagcttatttgtgcaaataatgggtaatgttattaatctaaatttagcattcactagaaagtttgtgctagataaggtataagcttacatttatatttacttcatgcatggttttcaacatagctttattctcatctgcagctaaactttactagacatttttgtttaaaatgcaagataccaaagcagatacttgataacagagaaaatataaatagtgtacctgtttcaaattattactatttacaattttaaaataatttaacattttttttgccaggattccctaaaacttacattcagttttagaaatgcttaaaagagaggctaaatgtgtgtatgaaacaaggcctaaatcactattcggagatgatatgtaaataggagtctctcatgtcagtgagggaatctcgttttgcagttgtatgggaaactgcatcatagaagcttctttatattggaggaatccattgcttcattaaaaactcttatgctgagaccataaagactgctaaataaccacataataaatacatagttccaatagtattgaacttattttatttttttaatttatattgttaatttataatttttcttattactaatattgtgagatggtaattactagaaaaatgtttagtgtatcttagtgttgttaaatgaagaatagagaagatatttattgcaaatcttctttaatatgagggctagagaggaaatgatagttttccaaacagacagacttgggttccaatctggcatctgctactgcttacttgggtgatcttgggcaaaccatttcttatctgtgaaagctcagtttctttatatataagactatggggtgtgtggggataatacctatttcattggttgttgtgaggattgaaaggaataacatttatcaaattcttggtatacagtgatccattaactgttacaatgatccattaactgttcactcctccaactcttcaggattttcccagggtcttatctcagtaacaacttatgttttaggtagaaacttgaattagatattttttaaaggtattagcaaaactcagccttttccattgtgttttccagctcaattcaaccttccaaaattggaactacacggtttatgtcgttaatatcaggtaagacagaataaattatttgataaattaaaagtagtgtctaatttaatgctactatttgtctctctgattgtaccaaaatatacatacaaatacacacacatagctactatatacataatctttctaaaacaactgtgtattagttcattgcacaaaaaacctccatgctgcagcgatggttttaaactgttttgatcatgcattacagttaatttgtatttgttttaaatcatgttataatgtgtcaaaaattaaaatcggataattaaatataaatagaagttgttagtttcttctcacaccctggtggatcacctagagcaccccctggttgtgtgtacccatttcaagaccacttttttttccagatctaatttcgtacatcgacagtctgtctgattgcaacctaacttttcgaaattatccttcactgtatttatatttaaatcctccactatcttcagcaatttgtattgtccatatatcctcctgtgtaccttgttttcatagttctatacctgaactagttttctaaagtgtatgtcatgacccctaaacatatattctgtgaagataagagatttaataacacagaacaggtgtcaaattgtcatataagttcaggaagtacgttattgtacaaactgaagcagatttttttatcagaacgtctcagtttctttagtgtaataatatgaattgtgaatcttcaaaacagagcaaaagcacacagttgcctagctttctgaaagaagctagaacctcaggacacacatttgaaaatattggcttagaattcccattctgtctctttatttcaggtccccaaattttattgttgatgatgtagttggtgaggtggattaatgaatatatgtatttgtgtttttagttttcacctgagtgctggagaggacaagattaaagtcaagagaagccttgaggatgagccaaggtaacaggacaaagtattgtaaagagtataacattctttctcttgctcactactttatctggtagagaaatgaaaacaattagataggaaagaaaaacttaatcacatagcacagttatttctttagcactgctgtacactacttttttcttgtagttaaaactgtaatgtaacagactgggtagtaatgtatatccaatgaaaaataattgagaaatagggcatttaaaatggatggattattatttttagtatttccagtttatttatcataacccattgcctcttacttgaaattgcaaaggtaccttcaaagaaaatagctttaaataaagtgtttatatatgataacatctaataatatggataatagatgcctaaatgttttcagcatttaaagctattagttaattttctgaagtctcccttttaatatttatatcaggatcatgccttaatcatgcaggtaatttaatggatatgtccagcatatatgaccagttggcatgtaaggaccaaatgttcagagtactgtaaaacaaacaaaaaaaccctaaatttccaaatggaataaatttagttgtatttaggttattcaggtcatgtattgcatctctgtagatttttttttttttttttttgagacagagtctcactttgtcacccgggctggagtgcagtggtgtgaccatcactcactgcagccttgaactcctaggctcaaatgatcctcctgccttagcctcctgagtagctggggctacacacatgtgctagcatacctggctaatttttaaaatactatttttgtagagactgggtcttgctatgttgctcaggctcatctcaaactcctggcctcaagtaaacctcctgtctcagccccccccagagtgctgggattacatgtacaggcgtgagatgtcatatctggcctccatacaattttttaaaaatttgttgtgaagcaaaagtttctataagtcttgctggatctcaatagactgaattaaatcttatggatatacagccctgatgacggagcttgcttcttttcaggtgatatcttcttactatgaaaagataaaatttcatatgagaattgaccagagagctttttttttcttttcaacactagaaaaacaaatgttttgaaagttatattgaaagatgtcatttttgtatacatagtaaatggactggattgagccatgtgattagggaaacttgtttttattttctggtattataattttttctttatgatatgaaaacacagtagtatatttcagtactgtattcttgaaggtgacagaactcttctccactatttaaccaaataatttttttcaatcctttctgttaggtcatattgcatcttcagtaatggatccagcagcaatcaggatccctttgctggacactttgtgtagcaactgggacagccctgggtttggtagatatagccaatggtataccttcttcaggcagtcagcgtccgctttttagtgtacttactgtggttcttctactacctggtgatactaaaatcagccatcgttagtacatgtcagcacctcagaaactcttcttgaaggacatttaaattcatgggatttcagtttcctggtcttcaaagcaatgagtaattttacagaaaattatagggagaatgaactgagacagtgtatatagcaaaatccacatatttaggggctttttggtatgaactcttgccattatttaatatttatgtttatagcctttcttgtctcttttttctattctctatggctcttaccctcattggtgaggctttatagtctcagtttttgtcaaaaccacagtctactacttttacatacattgttttttaaaaaaacttttcctttcaatttgattgtatcacttaacacagaccatagcttcagataatgctgtcatactctattgcctagacagacaggaaaccaaagccacagagaggtttttttcaaataaagaatggctgatggtaacaacagatagaatgtaactttgtagaaccataaaatagtttcagttttcaggatgagagaggaaaacacacagataagacctgtgaaaatgtatggctattcctgacttgttgggtttgggtattcaatatcacccacaatactttgggctaattatgttctcagtattcaagacaagtaaaaggtcacattcccagctgtaagttctcaccaactggagtggcgaagcttgtctttaaacaatgacttaatccagggatactttttcatgggccattttaaaaattgttaagctatcatagtcacatctatgttcacagctatcattatattcattatgtttgcctcatcctgaaatatggcttgtatgcgaatggtaagcagtagatcattttagagagagcttttcagagttaattatgagaagagtagagcacctattccttgaaattagcacagatatttaggaaagaaaacttgagctattctttaatttcacctagccttgaatagcaaatatttcacatattccttcttattttttaacaccacaaataaattactactataatacttattaatattcatagtttcataaataaaatgtcactgcctctccactagacattccataactagtttaaaaacaatactaccactttgtctttggcgtgaagacagtaactgatctcaataatataacgtcttatcttattcatttctcctctgaatatgaagaagaaacaatttttttgtgaatccagagctttcacatataagcaaaagaaattctcctctacctgacaaaataatgttacttacttttacctcagtgttaaattaatagttttgatttctgcttttgactatagctgtgattgtagtggaacagaaaattatattactttaaattgtagaaccaaaagtttttaacagggctttggggatacatttctttgcttcccatagaggtatttcctttttaaagaccttcaaagtcaaccattctataaccttcttaagtaatatgctgaccaatcacagagtcgattttaagtatttattttgtgaaactttttaccataaaaagtatttgcaaatgcctcatggagatagaaaatcatttgttgctattctgaagaaattatatcacattcatgaatagtaacacttttatagtgttagtaaatataaatagttaatttctaatagttagaaatggtaatttcaaaagataaatggtcagttgaaatcatagttttattaaaaaaaattaatttggggccacaaagaaaaaatgtagaattaaccacaggaatgctgttttcttgtgtttatgctttaaatgactatataatgtattactataaatattaaatattaaaatatttctgaaaagaaatggagttatttgacagaattatacaagcaatagcctatagaatctattaatattggaatatttttaacattataatttacacagcagcagagaaagtctgtgagcaccttggctaatctcttcagtctcaacaggtgatggtcatccctctacatccaaatactctgtttctcctaccaaatgacaagcaaccaatgaacaacaacaacagttctatccgaaatgtttccctaggttggtgctttgggcccttctagtttacaatgctaccaacaatactaatttggaaggaaaaatcattcagcagaagctcctaaaaaataatgagtccttggatgaaggcttgaggctacatacagtgaatgtgagacaactgggtaagtgactaatttttttataatatgcattttatacaactgtatattcaggtttacttgaaacaacagcagaaattttctttatgcgctatttgtttatgtaagttttttttctgatggtgaagttcagtaacaaatgaatgacatagcagaaaaaaaaaatcagctcagtgtctgtgaatccaagggaatgaaggaggtagatgaaagtttatattttactttaggaacatattttgaaaatactaacaatatgaacaaaatgccagaataatcttgatcatcactgttgtcaactttagggaaaaaaaagagtgtgtagatgtgaatgtgggaactctaatgagataaatcttatagaaggagatttcctgttttaaaacatctcctgctgggcatggtggctcatgcctataatcccagcactttgggaggccaaggtggagaataacttgagcccaggaattcgagactagcctgggctacacagggagactgtctctacgaaagattaagaaattagttgggtgttgtgctgtgcacctgtaatctcagttactaggcggggctgaggcaggaggattacctgagcttgggaggtcaaggctgcagtgagccatgttcatgccactgcactccagcctgggcagcagaatgagaccctgtctcaaaaaaacaaacagaaaacgtctccttctctcatgttccctgtctctattagtgataccactgtcttcacaggactaggtcatgaatgtagggattctgttggacctaaaatcaagtttctcctggagatcgttcacatcctaagctctagccacacatatggcacggcttgtacttccacaaagaggctgtgctgcttcctttagataccctttctatatctttgcacactgttcttctccactcccaccggcaacctcattatcacctatgtatttttaaagacagctcctaagtcagctcttctttggaaccttttctgaaataaagtatagacatcactgcctttgagcctctacttcatgctgtccagatgcctagagcatcatatgcatcagaagaccatagtacttagaagactagatatatttatgttcacatatatatatatgtatatattctgtaaacaataatctctgacttaagatcatattttcttttttctttaactcttacttcccacatatttccagaacccagcacattccctggaactggaacacttgttgaatagacaaatgaatgagtctgcatgagaatattttaggaaatcaaatgttcacaaatatggataacaaaaagcaattgttttaatgttattctatgattgcaattatactgtgattaggtacattagtagagatcaaaagaaaagaaaactttgacccttcgccttctctacactcaggaggttgaattgagggaggcaagtgttcctcagccttgaagagggcgattgcgaccaaggccataatcacagtctagtaaagaggcaggcatctccacttctgtgaggagccacccatctctattgggtggatgtacaccgttacaaagaactcatagagatggatgaatgcaaataataatactaatcatggtaataaaccatttctgagtctctatgggaaaatacttcttaacaaatggggctttttggagggagggagaatgcaagctgctaccctttcacgtataggagtcttcacaaagaaggagtctgacaaatggtagtttatctatgactggagaaccctaggaggaccagcactggctctgtcctcataggctgtgaaagcccagcaccactctgtccatatatttagacatttaatttataccatttaatttaaattatccgttttattgtttttctgcaaatgaatctgtggataagcgcttctaccaatggaaaaataaaaggctaaaacctaacagttttaaagttcacagtatacatgggaaagttatttgaattttcagttggtgatgacagtacttgttcccagaaaactgatataactcactaatgctcagtactgaaatacaagagtttattgttgttgttgacgtattgctgttactttgatatcctttaaaatgtagaatctgaatcattgatgtcatgaggcttacttagagagtcgtcaaacaaaaagtcagatgatgtgaggataaagaagtctgagagtttgttggtttgcaggtgacttcctgtgtcccccttagttagcttccaggcaggagaggctatcagagcagctggaacattttctataaaatagccacacaactcaaagaagacactattgaggcatcatttctaggctttcccctttgaaaaaaatcaaattacattttgaatttttcaggattgttttccttctctgtagggtttatttctttgaataaaactagtatctgctaatgattagaatgataatgtatgtttcatgtttatacttacataactgtgttttttacttaaggttttgtccaatgtaatgatttttggatttgaagtgtattaaatgttaatgttttttctaacttctaatttttttttttacaaattctgaagataaacactaatattttggtattacattaaagaaatacctaattaccagcattgtcattttgctttcatcctgcatctctaatctctaactttaaaaaataggtgaatatttctcatgctggttcttatgttcatataggtcattgtcttgccatggaggaacccaaaggctactactggccatctatccaaccttctgaatacgttcttccttgtccagacaagcctggcttttctgcttctcggatatggtaatattttcactgactcttgccagcaaagctacatgttatcagccttcccagggttatacgtgcagcacggtagttcttaggcattatattgattgcaaagaagggcaggaatctctgtgtatgcctgtatcattcactcctggggaataaagataacataagtggatgactcagaaaggcagtgttttcctcccagccacatgctaatcaagccctttcacagaaaaactgaagagtttagaagccagtgggtagcaccagagcaaagtaccttgtatgtggatgaacctagcctacccttggaacatgcgtctggaattccgaaactttttaactattttgactgattattgctggaatggggagaggaggcaaagaggaaatgaagacaagatccagattgggatagtctgctgatggaaactgtcagggtgtagattttctctaaatgtttaacagaaacctcagagactagataattgcagggattcatggaatagcaagtcaaatccatttctctacccacctcactcccaattagagttttcctgggggaaattcagaaatggaaactgcctaagcataaatactttgcatactataaatattgctgggtttgacactttgtagggagcaaagaaggggactgtagagatgtatggacttgagtttgaaatgtggctccatctcttcctggctgtgagaacttggaaaattcgttgatttaccaaattccatttaatcttctataagatgtgaattataatctgctttgcagagttatgtgaactcaaaatcagattttacctgtaaagttcttaaagcagtacttggccaatgtatcctaggttaggatactgctggtattttgtttccaagatgcatgctactgatttttttcccataagaatttttagcatgaaatttatttcagtgcattacagttttattttcaaaggaaacttaacctagaaatcaaggcaaatcccaaaagttattaactaatcttttcagttctaatatcatttataggaaaacaggaaaagaaaacttgtagaaggaaatagtgcaaatggagaaacaaactggggtgagagaggagagaataaggaagggtgagaagaatgaggtggagaaatggagagaatttgggaacattgtatagatagggtgataaacagaaataggctagagagatagaacgtagacatataaacaggtacagagataaacagagaattaaaatggaaagagtgagaagctcagtatcttaaagggaagcttgtccattgatcatattgtaataaatgtatatatcatgtaaaaatccctttaagcagtacaaaataataccagttatatcaaatatttaaaatatctattttgtttcatagtttttacaatgctaccaacccattggtaacctactggggacctgttgatatctccaactgtttaagtaagtgagcagttttcctttatttctcaaggacaaaatgacatgacttcatgcttcatgattttcattgtcttcgagaatattcttctgctctgtgatactgttttcatattaaaaggcaaatgattgtttcacttaagacagaaaatactttttactctcattttaactttctgttctgtaggggattaaaaatagtaaggaaaatctagagaagacaaaactaatatataaattgatatttgtatcaatgttttgtagtttgcattaattttaaatagcaaatatacactaattcagggattctgggaatgtttctcttagaactttgtgtgttcattcatccctccaagttatttgtatcttactaaagagagaagttagtctctgcatagaaagaaatattattgccttgtgaatatggggatgaggtatacacaggaaaatctcactttcttgcttcaactgtaaagtgaaatattacactctactttggattcctggaaatgctctaaatattcaggtaaaacttagtgttgttttcttctgcctttgttttagaagaagcaaatgaagttgctaaccagattttaaatttaactgctgatgggcagaacttaacctcagccaatattaccaacattgtggaacaggtcaaaagaattgtgaataaagaagaaaacattgatataacacttggctcaactctaatgaatatattttctaatatcttaagcagttcagacagtgacttgcttgagtcatcttctgagtaagtattttttttttcctggagagtaaattttattggataatgatgttacatgatttctcacctatctgaatactttgtgcccagatttcagaattcaaatctctgcaagatgtattgatagtcgttaatagtgaagcaaggtcattcacaacatgaacttaaaagttctgtgtgtttttttttttgagaaatacaatttacaatatacatagccctagaaagcataagcagtctttcattttttatttgaaaattctaaatttagtttaaaaattataaaattctaaatttagtcgaccagtagagttatgcataactgatcattataagtccactatactgtgaactatgccactgacagccacagccacatgattgttggacttctgaaatgaacatgctggggcagatgaaaatgtacctgtatttatatgattcaatttgtatttaattgcttcatttaatgtattaatattaaaatatttaatgtttttctatttccttctcttctacatttctctgaagaaaattttatatttgttaaaaatgtattttctaacaatctacataataacaatataaacatttttatggcatcttgcagttcacagaacacttttatcgcattatttcctttgattcttgataagccgtaaggtagggaggatgctttttcatgttggaaaagagaggctaaaataaatgaaaaacagtatttgttcaggatgatttaattgttaattttctttaaagcagatatttctcttgaggatttatccatccctgtgattccatattttaacagatatcactgtggattggggtaattttatgggtgttcatgttaagatcagaaaatctaaacacaattttattttgtttgtattttgccatgcagcaaaacatgtatgtttaagaatctaaaatatcatattacttaatagtggcattttttgtcgttactttagagctttaaaaacaattgatgaattggccttcaagatagacctaaatagcacatcacatgtgaatattacaactcggaacttggctctcagcgtatcatccctgttaccagggacaaatgcaatttcaaattttagcattggtcttccaagcaataatgaatcgtatttccaggtaatgagccagtggtttctttcattttaattaattagttagacatataaaaacttgctgatcacttagcagttgctgcttccaagaggtcttggtccatgaagtggcaaggtctgaatgttggctaagtttaactagagcagtagccataaagtattgtgggagctcagagtgggtatgctttcataatctgggtgacaggggtggtcagcttaccttctacaagaggggttactggagctaagcatgagtaggggccaccatacttggggtgagcatcagttcagttagaggaaagagctttaagggccccaaggtgaaaagaagcatggtgcattctctttgccagtggttctcaaactgaacattagaatcttctggaggaggctgggcgcggtctctcaagcctgtaatcccagcactttgggaggccgaggtgggtggatcacttgaggtcaggagtttgagaccaggctggccaacatggtaaaccctgtttctactaaaaatacaaaaaaaagttagccaggcatggtggtgcaggcctgtaatcccagctattcaggaggctgaggcacgagaatcacttgaacctgggaggctgaggttgcagtgagccggaatcatgccacttccctccagcctgggcgacagagcaagactctgtctcaatagaaaaaagaaaaaaataatcttctggaggactagaggacttgttaaaacagatttctgggacctactccaggagtttctgatttagtaggtcctgggtaggcccaccaaatttgcacttttagcaagttccttagacattgctggtctaaggatcatactttgagaacccgtgatgtagaagtctgggatagcaggtgacagtacggctggacacataagctggggctggattaatggagaaccttttcaacatgttcaagcgacacataagcaaagagttttcaagttcctactacatgccaggcactattagccaccagagcaaacaaaatgaatgaagcattgtccttgacctgggagagtatagtatgtgaagcacaatatatcttttaactgtggagatagaacaaactgaaaatataaaaagcctgaaatcaggatacaggcaagaccttttttctccattagactaggggctcttttgggtaattctttttcacattttaagagtaaaactcagtcaacctccgtctcattccaagacaatttgcaggaaagcattctttgtccttgagctatggtttcaggaaaaatgctatctgagagtgttcataaaattttaatgcagtctgaaatcaacaagttaacttcagtctctttctctttctctctcccttgcccctttctcccatagttattatctttcactacgtgttttgagaaaacctcaaaatctgctgctggtaaatctaattcttatacttgaaaatgttgactgatttatagatttcttcctatgtcttaattaaaatcaatgcattttctcctttggcacacatgtaaaacccaaatgagatctacagctctgtctgtaggggtttatccaggagttgcagtgactactgtagatacaaagggaagtcctggtactggctaatttgaacttgcaattgttcactcgcctaactatacatgtggaataaagttattaccattcaattatgattacttgaccaatatatctgtgtgtgtgtgacagatggattttgagagtggacaagtggatccactggcatctgtaattttgcctccaaacttacttgagaatttaagtccagaagattctgtattagttagaagagcacagtttactttcttcaacaaaactggacttttccaggtaagcacattcattaaattattgtttttcaactgcaaatgaagtttctttgagcaaagaaaacaaaactttagattctgttgaaatatatcagaaggtttagaaaaatttactgtgttttcaaaactgaaaatttttaatataattgtttaaatattttatttcagataatatgctaattaacaagttgtatgtacttcaatttttaaaataattcaagtattaggctaaggcttgcattaaacaattagaaattgaattagtgaagaaatgaccgtttattattacttttattaaatattttatgctctccaatcatttaggcctttacagttaaagaaattgcacaccaaaggaaagggttttttttttttctttaatttagcagtaagtactgtttacataatgagcagcattcttggctttaatcagttttcccattagtatttcaagtgacctttggtctttacacatccgcagagtaagatggaattgtgctaagcacatattatcatttttattggcatcatttctagattctagaaggcccactgccagcaaacactggtgacctctgtttgcctttacaagtacaacctgatcgagagcaggttcgctgggccctttttaaaaaataaaacttatctattaaattcaagatatcattgcatattgaacaatgtgacttatataaaatagcaagtctcaaggtcagagaattgtttctaatagatctgcctttatatgtcatgtgtagaggagcagccaagtagagatatagtcaaggaaaaataataccatggaatccttgacagtagttaattccaaaatttaaaaattttatcaacaaatgttttaggaaccagctctatacaaatttggtgatttatatgaatgcaatttatatattttgtataaaacgtgtaatttatcctgaaagatttaatagctataaacatgtacaactgcagttttaaaaattatggtaacttgaagtgtatgacaatgttaccttaaaaccaatataaaaatgcagcaaaacatgtatgtatgtaggtgccacaaaatgtgaatggtacagaaatggagtccagtgcagggagaaggtttagccctgcactcttagatttgcaagcatctgtcattgttttgagtcttctccatatcattgtttccttctcctttggtatttctctaccaaagttgttattaggaagcatatctggccaggcgcagtgcctcgtgcctgtaatcctagcactttgggaggctgaggagggaggattgcttgagaccaagagttcaaggccaatcaagccaacatagtgagacccgtctctttaaaaaaaaaaaaaaaaaaaaggaagcatatgttcagtttctaaagttaatttacaggagaatgaaaaaactttaaaggttctgtggtgctcccctatcatagagggcaaggtacgatggtgatggtgtttttttttgtgttttactgaaaggctgggtatcaccagctaatagctgagtttaataatgaccaccacacaaaattaacaaaaagctatattctggatgctgaattttatttggaatttatcctgtgattattccaaaacaactgatttgtaagctatgatataaagagaaattcaggagatttgacaagaaatacaagggaaagaaaaaaatagagatgaacttgcagaatagaatgcttattggtccaaaccattttatgggacagatttgatttcctgacagccttattgcttaagtgaaatctgcagatgctggcaagtatacagtcagagaagaaggtagaagtcctggatgggacttgaatccagtattacttttaggtataagttagtaaacatgtcaggctgttggcatggatgtgaaagatgtcttgctttttatttttcacaccatattttcttcatacttctctgaaagaaaacaacatctatcttctaaagtagggaaatgatctaattgtttcacagctttttatgagtttatattatttatgagtctgcattgtttcagttgttaactggctgacatcagtcaccacaatcaagaatgtagttttatgaactcagtcttacaatattggctcccaacattccctcaatgtatttattataataagggaaatagcaaacctccttcaggaaagccagcaacttgatgtgataaacaggatgttctagaactgaagatcttaagtgtaaaaattgctgacagtttgcttattttggagcaccaaagtaaaataaaagtgtacttctgactgatacacgcgatttttttttctttaaaaggatgtaggaccccaaagaaaaactttagtgagttatgtgatggcgtgcagtattggaaacattactatccagaatctgaaggatcctgttcaaataaaaatcaaacatacaagaactcaggtaagaaaacgctcccaatagcatttggacagaagtggactatttaatatactagtggggcctttttttctacatgttaaaaagtaactgaccctttttttgtggagtagggcccagttttctataaagagagaacaactgatcaggtagtgctttaaagtcacagtaaattgaagcagctggagaggttagtcttatctaggactcaataatcagaaagagaagggaagtgaagagaagggcttctatttttcagatataacatatattgcttcagataaattagatgcagatgtagttgcacaattctgccaatagaggttttggttgtttctttgtatttctgtgtatatttgcaaagataactgcaactgggaaagccaacaaagaaacaggggagggtggacttattttttgagaggttagcagtggttagtctttgcaaatgttgcttttcttgttgcttcattacccttgtcatctgtttgtttgataaaattagatggaagttctcattgtcccagatggcccaagaacaggtttttctcacttttccaaagggccctcatcatgattctgccatttattagataggcaggaagacaggctggaaatgagtgtgctgaggattgaaagccaagtcacctaagatctagcctcctttgccacgaaccgtcttagacttccgtgttcaacactttggcttcctttgtttcagccccttcattcataaaggacgatttttaaaaattgtagaacatacataatataaatgtatcatcttaatcatttttaagtgtacagttcaatagcattaagtgtgttcacattgttatgcagccatcaccactatccatctccccagttgaaactctcctcccattaaatacccattccctgttctctcctttcaatagcacctggcaaccaccatcctactttctgtctcttaatttcactactctaagtacctcatataagtggaaacatacagtgtttgtcctttgtgactggcttatttcatagcacagtgtcttcaaggtttatccatgttgtagcatctgtcagaactgacttcctttttaaggctgaagagtatttcattgtatgtatatactagattttgtttgtctattcctcattgatagacgcttgggttgcttctactttttggctcttgtgaataatgctactgtgagcatgagtctacagatatcttgtcgagtccttgttttcaatttgtctatgtaaatacccagacataaaggagaattttgaagatgatgtgaaattgtagtgtcaagagcttttctaaatgctaagaatgagagtagaatcaatatacttaatgatgggacatttgtagtaacctacagataaatgagtaggtagtatgattccttatgaggttagagttgattttcgcttgaagtctctatgggagagaagaagatccccctaaattgcctacattttcaggttgaattggcatgttaatactaatctatttctttgtgaaacccttcgtgtttttattcttttgccatatttaaatcatggcattttaaacacaatttcacatgtttattcttatgttaatataggaagtgcatcatcccatctgtgccttctgggatctgaacaaaaacagtaagttttaaaatattggttgtcttaatatagataacaactgaattttaaacattgttagacacccccatttcctttaattccaccccaaaccagagtgagtcacaatgtaagtgtaaatggcaaatgagctgcaaagttagtttaggtagcttgggaagtcagttctaatttctgtaactttttagtcattgcaagaagaaataggcagacttcactgtgttttctttcatttttcagttgaacaacctctttgacatcagttatttataaaatacagcatacaattttattgctacttttgatgaaagtagacttgcacttaatctcattcttctaagacacagttgaggggattatttgatatgtgtaaggcagacaatttaaaatccagcttccagacctccagttatgagggaggtgagaagctgactgaaggaatgtaaatatagaaattgatataatggacatatattacttgaaagagatgaagagcctgcagaattagatttgacaatcaagaaaggaaggcaaaattaagggatgaatcaatcagtaggcataaggtgtaaatctctttgaaaggaagtacaaataaagaagcttcttctgtttgtccccttgtgaggattattgtggccagattcattctgatataaaggcagggtactttgctgatgaaaacagcctgaaaagggcaaaaacttctttttttgatagttcttgtcacagcaagacaggagttttttggtggaggggtttagttgcataattttgagaagatctttactcatttacctagttaaaagtatcactttattatcttaaaatattatttaaataaatggattcaatacattgacaatatgcattgctcatattccattttataccatgaaagtcaaataaggtggtttcaagccatttacaatcagttactaccattcatgatttttgtatacataaatggcacattctaagaaagcaaaccttctttgttcttatgtcttcatgaaaatgtagattaaccctcagaaaaaattgttggttcattagtgtgtagtgtatttgaaaatgagtcttctttttgtggaagttcattttaaaatatgttaaaaattaaacttgaatcaaacatttgtggaactctcaagtttgaacctactgattagatcacctctaactgcccacccagagctaacatttgattattctaggaatccaaattattctaagcattgaaaactttcataatggtatccattttacagataaactctgtatggcagaagagactgaggcaaatttctctatagaaggtctcatccattatagagaagaaactgacctgctgttttcacactgtttgttgattccttcaacagaaagttttggaggatggaacacgtcaggatgtgttgcacacagagattcagatgcaagtgagacagtctgcctgtgtaaccacttcacacactttggagttctgatggtaaggggggaatttctaagctcattttgacatgctgtaactttggatggcatactccttttttgtatgtatttttagattatgtattttgggaattatttcctgatagttttcatctgtaccgtgaatcttaattcttaataaagaatctaattagcaaagatcacatattaaaaatatgtgaaagtaattatagaaaagaactttctccctttttttcctgtagcattaacagtgatgataaataatcccagaaacaagaaaatcctcatgaaactttttaattaagagagaaacagagtcaaagagatggacggggagacaagtgggaggagggagagaaagttaaagaagaaaatgttgggtgttactaacatggaagggaattgtgaatagtgtaatcaaaaaaatttttcttatgttgtcactcattcaatatatttgaacgttgctttgtacctggtactgcaccgagtgatctccctcctagagattgcagtttgttaggacagactagtgactagggttagaatggagacttcagagctgcaagagagataatggttatgatgtttctgtcactcttaggcctctatatcattctttccttccttcttccatgcccctgttttatcttattagccagcttgccaaacagttttaaacaaaattagattgcgtcaatgtgtttttcttatcccaccaaattttaagacgcaccacgcatccagcgacttctttgaactcatccatagatttatacctttcccttttatccagtttacctgtgattttgcaaacacttttctggtctccagggtatgctctgggttgtagcatagcctttgtttctgtttggttttcataaagggaccaaaccacatttgttttttaataggagataggagtgatgtgagctgaggcaataaagcttttcaaattagaatcacagacgtcaggttttgtttattcccgcctttaaatcttgcacccttcttcctgtggggactgggaggaagccttgaggatctgtgggatgtagtatttggctcacaaatctactcagcctatgtaaatggccattgtcatatggcaaccctgcaagttgtaattttcctgacaatcaagtacataaatgctctgcagaataagagcaagtcatttaaaaaggtgataaatcatagaagacacctttttaactatctaaaatacaaatattttccttttgctgtcaaagcatgaaaatgaacaattaactattgcatgttttccttaagtaattataaaagaaaattcagtttccttccatgttctcttttttgcaaaagtgatagcaggcattctttcaaagaacacttattttttgtgattactcattcaggtatgtaagctttagcttaattcatttaaatatttcaactatgtgcatgttgtaagtctggtattaaataaatagataacagtaacaaaatttactcttcagagatgatttatatgaagccagagtttgcctgcccacgacttcatatggccagttccttcatatattgtctaaattttattatgagtttgtaattacgcattattttttctgctgctatctgattgaatggttaattatatatatatatatgtgaagataagcatcattcatgttctctttccattttctaccttgtctgtttttgtaatattaaaaattgctggtagaaaatcttttcagaacatatcctttttggtgatgttctcttatcttttcagtttttccagaccaccaagactttgttaagagtttttcttgacttagaaactctttattcacttgtataagatattcccagagtctgcattgtcccatgacacattcaccagttcaccatatgagatgctaaaacaatgcacctcatacctataattatatcttctggtctacaaatatttcaagaatttaatgtcttctgctacatttctttgtactaaaactggctttcatgaagattagtacattttcatattggctatatcataaaagttttcatattttcattctctaaaagaacaaaacaacatgaaattgtgtataaatctgtaaacaaatctgtaagcagccttatttaatttctatttgaaattctggatttaattgtgatttgcaagtcataggtttttcaagaatttgtgacacatcacttggcaatctctcaaaaccatgattcatctctctgggctgatgaatcattggttgagttagcctatctgtgaatcaagtggcaccaactcaaaccccatcccatgtaccctgggtgccccgtgttctcccagtgttttaagggattcctgggataagaagatagggggagccccctcagactctgagcctctgcttctgctgaattccatcacttcgtgcatggcttgatgttgcagagatactgtacctgttctttactgcatcagtgaaacctgaaactaacccacatttctttatcacacacacacacacacacacacacacacacacacacaacttaaggcctgtgtgtgagtagcagattttattggcattttgatgacagttaaaggcaatttacatatagaaggaaaaatcataaacattttctccataatttaaaacctaaaagtttacgctagatattcaatacatcccttctgtaagaacactccattttttaacatctacataaaggaggtacttttctcctccaaccaggattgagtgagtggtcttacctcaagatttattcctatcccaatcccccatttaaggcagaaaagaaagatttttctaccaagtccagacctgtaagtctcccttagcacattgaaattaatactttatattaatacactggaaagtatttacttctttccactccacaacagccccaaataatttaaattgtatcctttcagtactataggaataaaaaagtctatgacccccaaaagtcttaatggcatctcagttatgaaaataaagacagtcccacctcatacataccaagcattgaaataaccagggttaggagcctccgcaccacccttagagcctggcagtcacagcaccagcaccagcctctggctgagctccttgctacctggcaaggaacctaaaggcttgagggtttggccatatagactactgtggtctccatttgaactggtgccccaagccctgcaactgttaggaatgggcctgatggtttattatgcaaggcaaccgtctcctctccaatttctgttgagagtcctggtggttttgatcttcaggttataccggtttgcagaaagcttgggaaagaaggtaatgatgaaaaacaatgtgtaacgacttccagaagtaatgctgcatttttttcttttatttattgatcgaaaataatataataaatggaaattttaatattgatttacactgttggttttagcccctgagagtaagctgctctaatgttaacagtgaactttctagtgaaacagagaaccattctcatgagaagagagtttcttacagctgctcgccatgttttatgtaggaccttccaagaagtgcctcacagttagatgcaagaaacactaaagtcctcactttcatcagctatattgggtgtggaatatctgctattttttcagcagcaactctcctgacatatgttgcttttgagtaagtatatttttaatctgccaaacccattgctaactgttccaaatgtgaataagaaaattgcctcggctttgaaaaacatttatacactgtagggtggttgaacgttaatgttcatgtttctgataaaatatattatgtaacatgaattttccagctatagaattttaatttataattgctgtatttctatttataaaatgcattcaaatctgttagaaatgattaacatttaagtaagtaaaaattatataaggtgctttctgtattgtaaaacatgaaaatgtttgttttataatcttataaaattagtcctgaaacaatttttttaagatccttttaactcattaaaaatcaaaaaggttcaaataatttagggaaattattttttaagaaaaatgtcattcttacaactctagaatttttcctgggttaaaaaaaaattcagttgaagcccaactgggaattgtataaacaattggaaataattttgaagtaaactaatatttttaaagtctttataacttgccaaatactcataaatatccttagcccctccttttagcagaaccacatcagaaaggtggtgctacttatctcattgcagggttgtataagatacgaatttatacaggcctgtgcttaaaagattgatatacagtattagttctctcatagattccttttttcattttttaggaaattgcgaagggattatccctccaaaatcttgatgaacctgagcacagccctgctgttcctgaatctcctcttcctcctagatggctggatcacctccttcaatgtggatggactttgcattgctgttgcagtcctgttgcatttcttccttctggcaacctttacctggatggggctagaagcaattcacatgtacattgctctagttaaagtatttaacacttacattcgccgatacattctaaaattctgcatcattggctggggtaagcctcttaaaatttttttggttttgtttttccctcatgaaaattgccagattctcataggaaaaaatcttatttaaaaaaaaatagtaccattaagaggaacctcaaaattgtgaatggcatggattagatatacatagcctaaggaagggacatcttcacaactttattttttaaaactcatcaacagcactcactatatacacgagtaaaggaaaagccctcactccctgagtcaccacaaacttatttcctgagcccagagccagcccacccaagtctgaagaagcagctggcaggcagtgatgtcttttccatgatgctttaaaatacaaaggccagctcagacggctagttacactcatccccagacacatgcctatgtcttggaaaccagagaaagaatgttattcttgcgtgtgcaaccagaatacttataggattattgccttgaactttttgtaataacatgagtcctcagtcagacataggtggttgtattaacctgtttgagatcttctattgtgctcccttatttttgcaggcttcatattgagccaggcattttagagctttctcacagatctgtttcagatggaaatataagtgagagatattttcaagaccttcaaaaccacctcaggaggcaataagcacactcttcagagacctgggatgcctgccatagcatttccccactgaaatatacatggaaatactttattcaatctctggggagagaaggctacaaagactttatagcccccttgcttttcctccactttttctaaagagttttctttatatagaaggaggcaaaataggctgtaatgaccttgtctgcctaaactctgccagtctaacaaggcttaattaatgaaaccacattcactagtgctagatttgatacaaatcaggtttagttttccagtgagtcccactaagcaaacagaattttatttaaatatctgtcatttaagagtaggtttggattgttgccagttagagttggacattgaaccccaaggaggggattttgttgttaaccaagttgccatttctaagaagtttgaatctgggatatggaatgttggcttgcttgcatttctcttcttttcatttcttttctttacatttcattagcagtcttatgaagcagtttcagatgcttcaaaagagtttgtgtcatggtgtttttgtaacaggtttgcctgccttagtggtgtcagttgttctagcgagcagaaacaacaatgaagtctatggaaaagaaagttatgggaaagaaaaaggtgatgaattgtaagtaataaaaactttttgtgatgagtagatatcctttgtttcctgaagtttagcattaatttccatgccaataacaaggctttcattttaaaaggttgatgtttattcacatgactgccaaaatctctgctacaccacagattaattcagttgaatgccctgaaatgtttgagacactttttcatattaacattgtactctgtcatatggaggaattgagaaaatgcctaagacagttttttagcctcagaagacccattctatttcagaagatttcataacactctcacctcctcaaacccacccacgtcttcaagagagttaaatagcagtatcagacagagagtgaatgattcattgccaatgggagtgttaggtagaaatttagagaatggagaaatcagcatgttcttaaacaatttcaaaagttctcttcagattgtgagatcattgagattaagggttttatattgttcagtttgggcagttaccgatctcctattttattagtccaccatgggtactcaataaatatatgttgattgaaaaaattactgaatgaataaagagcctatttctgaaatgggacccatcatgccacatatctatgcatatctcatggatggataacatttacatcggctgggcgcagtggcttacacctataatcccagcactttaggaggccgagctgggtatatcacctgaggtcagaagtttgagatcagcctggccaacatggcgaaaccccatctctattaaaaatacaaaaattagctgggcatggtggtgcatagctataatcccagctactactcgggaggctgaggcaggagaatcatttgaatctgggaggcggaagttgcagtgagccaagattgcaccatgaactccagcctgggcaacagagtgagactccatctaaaaaaaaaaaaaaaaaaaaaaacccacttacatccaatcacttatccaatctctgtcccatttcttcacagtcttgccatctcttatatttgtaaagtggcactcaaaagaccccacaagaactagggaaaaataatggggctaggtgaggaattccagaattttagaagaacttctgtgtgtaaaagaaacgttagctctagggacaagcaacattattccagggacatttataacaacatacattaaaagtagaaattaataaataatttctaaataagagaattttagaagtatgttcatcaactcatacagaactttaaagtaccatttagtaaactgctataccattaggacatttcatttattgataatttactgtatgccagaatcatgttagtttctagaattcaaagatgtgcaggacagcttttgcctttgtggaggttatgttccaacatggaagatatggcccagaataataaccatttgtgctagaatttcaagatgaatttagttgctttaaatcatttattcaatttttgaggtgtcttaagaattcctatagcgtcgattaggcactaggacatctacaaattatattatttgacaactttgcatatagtacagttttaaaatttctttaatctactatccaatatatatattataagtatcaagtatcttcttctccatgtcactgggatattttgtaatcattgtaagctacgtaattgtgcatgacaaccatctgtatattaatctcaattataaggtcttgcctcatctacagcaatgatattagtagtaattattttgccacagtaacaaactcacaactagttgtgacttaagtgagtaggagtttactctttgcacatgacaagaaacatggtagtggcaatcactggcatggattttgtggctaaaaatgtcagggccaacaactctgcagcaggcttgacctctctgtcattggacagaagatgctggctgcggctccatagctcacttgcacgtttgaagcaggaagaaggaataaggaccttgccagttgagtctaccactaatagctcttccaaaaatcctttggcagacttctacttccatatcactttataaaacgatgtcatacagccactccttaaatacaaaggagaccaaaaattagtttttaaatttcccattctcagtgtacaggcacccaaaagaaaaggaggttagacatggcttggaacaagtcagccaagagtgttttcatatcaactcagaaatcaggaagcaaccttgtcttctttgtaatattggcttacctagatattaagacaatggccatccaaaaacaaatgaacaaaagacctatgaagagattgaagaagaaactgaggtccaaggaagtaaagtggctttctaaagacatttgagaggaaaatctgcagtagcccaaactaagctgagaaaagtcttaggtaaacaggacatggtaataaatctttttttctttctcatttcttcttttttaagctgttggattcaagatccagtcatattttatgtgacctgtgctgggtattttggagtcatgttttttctgaacattgccatgttcattgtggtaatggtgcagatctgtgggaggaatggcaagagaagcaaccggaccctgagagaagaagtgttaaggaacctgcgcagtgtggttagcttgacctttctgttgggcatgacatggggttttgcattctttgcctggggacccttaaatatccccttcatgtacctcttctccatcttcaattcattacaaggtaagataaattgtacatgaatagtctctgctttctaattttgtcatatttgcaagcagcttcacttttggacagatgccatgttaagtttctgtgtcactatttcaagtgctgaatatagttccatgtgcagtgtggtcacttgttaaaagggtcttgaatagataaatgaggtagaatgttagttttgcctttttatcagtggtatatgccaagcacctagaacactgtacctggcagatagtaggtactccataaatgcatattatttcatgaatgaatatggagcaagggaagtatctagctgagaaccaaacggggagtttaaagggatgcacagacaagttaccttcttcacagttttgctgaatgttggtcctcttcatacatcctgtcccctgaagatttaccgttgatggccagaagaatttttagagtctatgtaagaacagtagcagttcaccttgattttttgggtcctttgatttcagaataaataccaacactctagttcaggaacttttatctttttatgagaaatgttgaacatttcacagttagttcaacaattcaacaaacatttgtcaatggtctgctttgcataaaaataccaggcttccttcaaagagcttgcagtcatacctcttattccataatacataccatagtatactctataataaatttaacttttaagcttaagggaatataaattgtctttttagatcattaaatggaattctttaagattttgaatataccctgtactgttgatgaaactccttagtgtgcagaagcaccatgaggccaacactctaaaagaaattagaatgcttggaatgtttctgagtagagcagtgcaaatggcttaactgaagctattggtcttgcagttgtagatgtctggggaagaaattgctgaatatatctgagctggggtggaaagcagatttgtattactcaccaaatgaggtgccaaggtgggtactccctgcaagtgtgttttaagaaagtctgtagttatctgcaggggagagttggttactgcttatctcccatgctcttccactagcttgtgaagtgcaaaataattgtcacatggtaggtgcttaatgattggtaaattaatggattgctagatggagaaagaggctttggggatggcctattccaatctgagatgcctctggcataaatatgtattaactagttcagcaaattttattcaggttcattgtcttataacaaaggaagtatgtaggctcattatctttagtccatagaataagcctcaagtgcaactccaaaaattggaaaatgagtatgtagcatataaatacatctttattgggatctagctttataaagtgagtattcctctatttaatctcttctataatatacaacataaaagtgcttaaataaatattgacaaaagtatccattaacattagaaattccatggtttcatatttcaggattgtatataaaaggcacattgatctgccagcccagccttggttttgcttttagaatttcctggcagtttcagtaaccttcaacagctacagttgtctgttcagctctgtttccattaatgagaattgggatgttttatttttcccagcatgggtcccctgtcaggagggaaaaatgttgtaaaccatcatcaactcagtgttcttcataaatcactgacttttaagactaattttaaatcatataaattcagaacagatttcagcacatttaattatattaaaacacctcccagaaagaaaatttaaattaaaaggcagtgatacagagcacatgagtctaccaacaattgcttgctgcccaggcttgtgccaaaacttcttaggatgctatggaaatttacttaatggtttttattgttgagtcattttcagaaccttccaagagaggctttgttgttagcagtatatgctttgttaaaagaagcatgtagaatttagacagcttaaagaaatgattcagtgaatgcaaaatgaactcaggtagtaaggaggcaaactacattatatctaattttttctctttttttttttattatactttaagttttagggtacatgtgcacattgtgcaggttagttacatatgtatacatatgccatgctggtgtgctgcacccacaaactcgtcatctagcattaggtatatctcccaatgctatccctccctgctccccccaccccaccacagtccccagagtgtgatattccccttcctgtgtccatgtgatctcattgttcaattcccacctatgagtgacaatatgtggtgtttggttttttgctcttgcgatagtttactgagaatgatgatttccaatttcatccatgtccctacaaaggacacgaactcatcattttttatggctgcatagtactccatggtgtatatgtgccacattttcttaatccagtctatcattgttggacatttgggttggttccaagtctttgctattgtgaataatgccacaataaacatacgtgtgcatgtgtctttatagcagcatgatttatagtcctttgggtatatacccagtaatgggatggctgggtcaaatggtatttctagttctagatccctgaggaatcgccacactgacttccacagtggttgaactagtttacagtcccaccaacagtgtaaaagtgttcctatttctccacatcctctccagcacctgttgtttcctgactttttaatgattgccattctaactggtgtgagatggtatctcattgtggttttgatttgcatttctctgatggccagtgatgatgagcattttttcatgtgttctttggctgcataaatgtcttcttttgagaagtgtctgttcatgtccttcgcccagtttttgatggggttgtttgtttttttcttgtaaatgtgtttgagttcattgtagattctggatattagccctttgtcagatgagtaggttgcgaaaattttctcccattttgtaggttgcctgttcactctgatggtagtttcttttgctgtgcagaagctctttagtttaattagatcccatttgtcaattttggcttttgttgccattgcttttggtgttttggacatgaagtccttgcccatgcctatgtcctgaatggtaatgcctaggttttcttctagggtttttatggttttaggtctaacgtttaaatctttaatccatcttgaattgatttttgtataaggtgtaaggaagggatccagtttcagctttctacatatggctagccaattttcccagcaccatttattaattaaatagggaatcctttccccattgcttgtttttctcaggtttgtcaaagatcagatagttgtagatatgtggcgttatttctgagggctctgttctgttccattgatctagatctctgttttggtaccagtaccatgctgttttggttactgtagccttgtagtatagtttgaagtcaggtagtgtgatgcctccagctttgttcttttggcttaggattgacttggcgatgcgggctcttttttggttccatatgaactttaaagtagttttttccaattctgtgaagaaagtcattggtagcttgatggggatggcattgaatctgtaaattaccttgggcagtatggccattttcacgatattgattcttcctacccatgagcatggaatgttcttccatttgtttgtatcctctttgatttcattgagcagtggtttgtagttctccttgaagaggtccttcacatcccttgtaagttggattcctaggtattttattctctttgaagcaattgtgaatgggagttcactcatgatttggctctctgtttgtctgttgttggtgtataagaatgcttgtgatttttgtacattgattttgtatcctgagactttgctgaagttgcttatcagcttaaggagattttgggctgagacaatggggttttctagatatacaatcatgtcatctgcaaacagggacaatttgacttcctcttttcctaattgaataccctttatttccttctcctgcctaatttccctggccagaacttccaacactatgttgaataggagtggtgagagagggcatccctgtcttgtgccagttttcaaagggaatgcttccagtttttgcccattcagtatgatattggctgtgggtttgtcatagatagctcttattattttgaaatacgtcccatcaatacctaatttattgagagtttttagcatgaagggttgttgaattttttcaaaggctttttctgcatctattgagataatcatgtggtttttgtctttggctctgtttatatgctggattacatttattgatttgcgtatattgaaccagccttgcatcccagggatgaagcccacttgatcatggtggataagctttttgatgtgctgctggattcggtttgccggtattttattgaggatttttgcatcaatgttcatcaaggatattggtctaaaattctcttttttggttgtgtctctgcccggctttggtatcagaatgatgctggcctcataaaatgagttagggaggattccctctttttctattgattggaataattttttctcttttttatatttgtcattccagcaaaaatcatgatgtggtccctctgcctcatggaatttatattctagtaggggagacaggttaattaaatatattgctctatagaaattaccttgtgacgttgagaatgtgttacaaaaaaacatgatatctaagctgaaatcaggaggatcgataggaattaactagatgaaagatgggagtaagagtaggaagaataatatttgagatagtgggcatttcatgtgcaaaaaatttgctatagttgatgattacagtgtatattcaaggtattaaaagaaaactcatatatcctgagaacaacaaaagtgcaggatagtgacaaagcagagaggcacaacagagaggcaaggactagaccagaaggctctgtatttcaatctttataaacacaataggaagtctttgaaaggtggagtgacatgattggatgtgcactttgtaaagataaagctgtacctaatgtggtgaatggattagagctgcccagtagggtctgtagggcgagcaggtaggaggagactctcagtgtttggggaaaagttggtccagtattttagactgtggtggggatgagagagctagagagatgtgcacagaaccaagggaaatttaggaagcatgctgctacaaaatactcatcattgatttgctcattaaactcttacttttctagaatgattcgagtaagaagtcttcttgttaatacaatattatagttaatggatgcctatcattacaatatttaacaatggctaaagctttagaatgcagagcaacatcctgaaagctaaaactgtgctaaacatattttagtcccttttagatttagcttgcagggaggcaccttaaagtcagcagggtcaccatgtaatgttatggaggcgggatgtgtgggagcatgtgtttgagctgggtctgctgtggcatcagggcatgtattagttcattttcacactgctgataaacatataccagagactgggcaatttacaaaacaaagagctttaattggacttacagttccacgtgactggggaagcctcacaatcatggcgggaagcaaggaggagcaaatcaaatcttatgtaggtggcggtaggcaaagagagagtttgtgcagaaaaactcccatttttaaacgcattagatcttgtgagattcatttactatcacgataacagcccaggaaagacttgcccccataattcaatcaccttccactgggttcctcccatgatgtgtgggaattgtgggagttacaattcaagatgagacttgggtgggaacacagccaaaccatattattcaacccctggcccctcccagatctcatgtcctcacatttcaaaaccaattatgccttcccaacagtcccccaaagtcttaactcatttcagcattaactcaaaagtccacagtcctacgtctcatctgagacaaggcaagtcccttccacctgtgagcctgtaaaatcaaaagcaagttaattacttcctagatacaatgggggtacaggcattgagtaaatactgctgttgcaatgggagaaattggccaaaataaaggggctacaggcccagtgcaagtccagaatccagcagggcagtcaaatcttaagattccaaaatcatctccttcgactccatatctcacatctgggtcacactgatgcaagaggtgggttcccatggtcttgggcagctccatccttgtggctttgcagggtatagcctccctcacagctgctttcacaggctgacattgagtgtctgtgacttttccaggcacacagtgcaagctgttggtggatctaccattctgggatctggaagatggtggccctcttctcacagctccactagatggcaccccagtagggactctgtgtggggcccagaccacacatttccctctgtactgccctagcggaggttctccatgagggcctcacccctgcagcaaacttttgtctgggcatccaagcatttcatcttctgaaatctaggcggaggttcccaaacctcaattcttgacttctgtgcacccacaggctcaacaccatatggaagctgccaaggctttgggcttccaccctctgaagcaacagcctgagctgtaccttggactcttagtggcagctggatcagctgggacacaggtcaccaagtccctagactgtacaaagcatggggactctgagcctgacccatgaaaccactttttcctcctaggcctccaggtctgtgatgggaagggctactgcaaagatctctgacatgacctggagacattttcaccattgtcttgatgtttaacatttggctactcattatgtatgcaaatttctgcagctggcttaaatttcacctcagaaaatggcattatcttttatataccattgtcaggctgcaaattttccaaactttaatgctctgtttcccttttgaaactgaatgattttaacagcactcaggtcatctgttgaatgttttgttgcttagaaatttcttctaccagataccctaaatcatccctctcaagttcaaagttccgcaaatctctagggtgggatcaaaatgccgccagactctttgctaaaacacaagagtcacctttgccccagttctcaacaagttcctcatctccatgagaccacctcagccttgaccttattgtccatatcactatcaacgtttttatcaaagccattaagtaagtctctaggaagtttcaaactttcctacattttcctgtcttcttctgagccctccaaactgttccaacctctgtctgttacccagttcccaagttgcttccacatatttgggtatcttttcagcagcaccatacttctggtaccaatttactgtattagtctgttttcacactacggataaacacatacccaaaactgggccgtttataaaagaaagaggtttaattgcacttacagttccatgtgactggggaagcctcacaatcagggcggagggcaagaaggaggaaatgacatcttatgtggatggcagcaggcaaagagagagcttgtaaagaaaaactcccatttttaaaatcatcaggtcttgtgagactcattcactatcacgagaacagcccaggaaaaacctgcacccataattcaatcacctcctaccaggttcctctcacggtgtgtgagaattgtgggagttacaattcaagatgagatttgggtggggacacagccaaaccatatcaggacatatacatccaaggaatgacttttgatagatttcttgtcacatttgtttatttcttcaaaactttggctcaagcatgttaaaaactccatttaatctttcaggatttttggaaatgtatgaaggggtatgtgtttataaacacatatacatgtgtaattatatgggtactcacataaatttgaagagtctatctataaaattttatatatgctttatttttattttttatttgtatgttttatatttttatttctagcatgtatttttatttttatgtacacttataactgtataatttaattgccaaaaattatgttaaatgggtatcagaaaattgttactatctgtttgattataaaaattttacctacttaaataagcaaatgacatcatgaattgaatcaaggctgaaaccaaatttattattttctaattatccacaggataatgctttggtcttttaattttactaacagtattagttttcacactgctatatagaacttccttgagactgggtaatttataaagggaagaggtttaattgactcacagttccatatggctggggaggcctcgggaaacttacaatcatggcagcatggggagcaggcacatcttacatggtggcaggcaagagagagcatgtgaaggaggaactgccaaacatttataaaagcattaaatctcatgagaactcactcactatcacaagaacagcatgggggaaccatccccatgatccagtcacctcccatcagttccctccgttgacatttggggattatggggattacaattcaagatgagatttgggtggggacacaaagccaaaccatatcacctacttaatttaagttacagagtaaacattttgttgatttttttcctgcaaaaattaaaagataagtgtaccttctcttaacatagttgaattacatgtctatctgcttttgctatttttgctgttttccaggataaaacaggcatatcactgtattgaaattttaaattttttctgaagaatacaagcagaaaattttgtggtatacaaattgctatgcagcagagaatattctacttccattcaaaaaagagctgttactaactatacattaaatgagtagaggatagtttaatctcttacccttattcagtgttaagtaatttagagaaatgcgtattattattatagtattggtaaactaagaaaattaagtcaaagtatgaggtgaaatatgccaaatatcaatgaagtgtcccttgccactggaggctgaggttaggagcctcatgaaagttgagctgttacataattacatgtataatacacatattgaattggtgccaaggtaaagagatgacccaccaattcagtccctcacaagtgaaacatcagcttggctgagacattacagctgcaaggaaataaattactcactctttggcagggcattttgtgccacagagaaataattttctaaagggcaccttggtagtatgaaaggaggatttaagaagtttccagagagagccataaacccttgaagatccccagccccatagccagctgactgtgtctgtgtgacaactgaaaacaggagctgtttaaagatttggacacaggctactaaggatgctcagaggtcatctagactaatttggtcaaaaatcagtggtacctagagtgtgtggccacttcttctcaaatatctgctgtaactagttcttgaccagtttttcccaccaaaactccagaactgatcaggtgtagtggctcacgcctataataccagtgctttgggaggccaaggcaggagggtttcttgagaccaggagttcaagaccatcatgggcaacatggtgataccccatctttacaaaaataaaaatagaaaaattaggtgtagtggtgtggctgtattcctagttactcaggaggctgaggcaaaacgattgcttgagcccagaagttcaaggttacagtgatttataatcatgttactgcactccagcctgggtgagagagtgagaccttgtctcaggggaaaaaaaagaaaaacaaaaacaaaaaacctgccagagtatgttatgctcatgacctgattaaaacaccagtcattactacccactctaatgccatctcacatccctgaagttatctatatctgcaagtcttccctttaattgtatttctggatatttattatccgagggaagaaaaagtcaacttagaatatttatccagtttattgatgataattctgctgaaagtgtcagtggcctttagttgttgaagaactctaagagatgaggacccaaggttgtctgtttccccccactctacctagatgcttcaaagggactttttagagcaccaagtaaatgacaatatgcattgcctcgaattttactgtatagtagtatccaaggaaactctttctagaaattctttaacttttgataaccagaaagatatgagaacatccctttggctactgattttacatttgcccccagaaagccatggatcatagcctgaaacaagcaaaaggaatgagttctatgtgggagccaaatttctagcctaaatatctaagtgtatctttttcccccgaatagttaaatagctctaacaagaccaaggttaaacacaaccccatatagtctacagtaaatataatgccaatacttagaaataggtgtattattatttttcaaacatgctacttgattgtgttctctggtagatgaaaggattagatatcaaaagttaaattcactacttgagatttttcagaatgtttctcactccaagttttgaaaaccttcttggctgcttattcaccatcttccttcactatatttgctgagccagccttggcccgtaggagtctttctctaggagtattagacaagttggcatttgataaattttctgtcctaacaacccccgtaggcccactttcagcacttgtgtgttacttgcaacaccctttctccattacaattaaaatgttatttattttaaatgaggaaattgcaaattttactgagaattaaaacattttcaattcacaattacagttttttttttttaaagctaagcatatatctctgattagtgaaagatggaagtgaaatgaaggcaggactaaggatgggatgaaagttttgggagctgattaggaatctgctcatttaacaagcatgaaggtttttttccttattgttctagcatggaatggattcttaaagaatcaaggcagttatcaagctgaagaaacttaattctaaggaattttggcttggattctccagagtggtagttttccaggctaaaatgcaccaaaaaaggtctatcatgagctcccttttgtgatacatgaaggtttcttgaaactggcactagcttttcaggatgatgtaaaagctttaactctgcattcagtcttttgggccattttatttctaccttttatgggcaatgttaaataaagcttcaagtactatgaagaataaaacctgattgtcctggtcccagtcacatcttaatgctctttccagaaagctagaacagcatattcttcctaggtggtatgaagattagcaaagggaaaaaaatgatagaaagaggccaggtgcggtggctcacgcatgtaatcccagcactttgggaggctgaggtgagcagatcacgagctcaggagtttgagaccagcctggcaaatatggtgaagccccgcctctattaaaaatacaaaaattagccaggggtggtggcatgcgcctgtaatcccagctactcagcagattgaggcaggagaattgcttgaacccagggggcagaggttgcagtgagccaagatcgcaccattgcactccagcctgggcgacagagccagattccatctcgaaacaaaagaaagaagcagaaattggaatgagaaatcaaacagattttcttggttgtcaacacagaactctattaaagtttgtgattttagtcctgcttctgacaccgagatctataagtagatggaggaaaaacaaaaacaaaaacaaaaaaccctcaacctcagaatttaagaggtaatagccatgttttctcacagtagcctccaggtgcccttggctctctggcttcatttctactgctccttcctgaagtgttcagaatttctttccatattgcttgtgtgcactgttacagatccagatgcctgccacactgcccactactgaactgtgaaagggctattttgtcctggaggaattttggtataatatttattgccagactaacttaaattcatgggaaaagggctagtgactacaaatagtaaaataacctgttatgagaatcctattcttatttaaaatagaaatgaatctcaagattataggattcaccatatatatattataaatacaataccttaaaatttaaaatatattcattcctaagaattctaatttgttacgcttattatgtaattttgttccatagcgtcacaattcatagtggaaggtagaacatttaaatgacttctcctctccagtgtttccaaaaattattgagtgcctgtatatttacagaccacaatggttacttaaaaataggcaatgtcatttaatgttatataattatgatatagggcagcactatacaatctaaaaaattgttttattaagtcagtcttatctttaactttatcctctctggctgtgcttagcatttgattctcagaataattcacattttactaccccaacaaggctaagaaactgaatctgtgacctcgttcttttctgatgtcctcaaaacaccagacacaacctctgaatgttttttccaggatatatagcatacagaaagactactaaggttacaaaagaataatagagtattaagggaagcaacattcagcaatttttctttctacccagaactaaaaatcatttgctaaatgtgaggccctctaacgaataatacctgggttaatgcttaggaacaaaagaccttcgttgaagtttatattcccctccagctctaaaatgtgactctgttaaacaattgtttaagaatacacagttacttatatttctagctgtgtgacaaaaatacctccaagaacaaattctggaaattctgaccccgttaagggaacatagagtaagctgagacaatgtggacttccttctctggagctgcagcctccgtcatctgtagcctctatttaccttacctcaggcttccttcagtccactctactctgtaactgccaccctctcttcaaaacttaaaagaatctagtaaccaattcgaattatttatacacttttgcttattcaaagtgctggtggtacaaagtgtatttgcttattgaaaggattgactgtattggcaacctgattagggaatgtggtaggtatggaaaggctttaaaaagcaatgagatttagtcatgtagagtgtgaggatgaaatcctaaccgaatgatatctattccgtacttcctgggaaggaggatcagcctgcaaagcctgctctgagggattctgagtatagaagaaaatctttccttactctgagatttgtaatgccctgacacaggccaggacagtgtgcagccagtgccctctccaactcttcctccccaacctggagcacagggaccttcacgaggtgcttgtttgctttctaaataattgaaattgattgatatttattaatgcttttcttttgttaaattagaacttcccagccagtcacgatggctcatgcctgtaatcccagtgctttgggaggctgaggcaggagaatcgtttgaggccaggagttctagaccagcttgggcaacatagtgagacccccacttctacaaaacattagttagatgtggtggcacatgcctattgtccaggcaacataagaagctgaggcaggaggattgcttgagcccaggagttcaaggctacagtgagctacagttgcaccactgtacttcatccagcctgggcaacagagcaagaatctgtctcttaaaaaagaaaaaacttctctaccctatctgatataacatttcaaagaaatagatcattaggatttatttcctttacaaattacttcattaccaataaagtattagtaataaattatataataaataaaatcatattttatttatataaatatataaccatatattaatatcaaataacataatagtaataataaatataatgcactattacttaggtcattgcatgccttattcatacctctcagagatcaacatatttaaatttcccagaatttttttttcttttttgagacggagtctcgcactgtcacccaggatggagtggaatggcacgatctcggctcactgcaacctccgcctcccgagttcaagcaattctcctgctgcagcctcctgagtagctaggattacaggtgccaaccaccacatccggctaattttttgtgtttttagtagagatggggtttcactatgttggccaggctggtcagctcctgacctcatgatccacctgccttggcctcccaaagtgttgggattgcaggtgtaagccaccgcgtccggccctgaagaactttttatgggctggtcatctacttgaaatcaatgaccaaatatagtcagtactttcatagtggcatttttctgcaagtcaaaatatgtaatgattcttcagtaatttaaataggaatttatagacagcacctattaagtatcagggcttgtgctcagttgctaatcaccaaacaacaagctaaacctagaggagaatcagcctagtcattttactgtgatcaggacccatcatgtagaaattaagctccttttctataataacatttgctaataatgtaatttattctgaaaactaagggccgctttgaatcttcgtattaaaaaataaaacatgtaagcataaccttagacttattttgcaaatttatgcaaacagtactctaaagagagtactgttaagactttttcccactttttccattgtacaagctgcaatgtagttttcttgatgaatactccatattcaaaaggaacatataagttttaatgatcccttaaaaggactgtcataagttttacatttatgccattccatactagaccctttgttccatgaatacaaggattgcctacctggttcaccattgaatctccaactcctaaaacacagtgcctcctgcttagcagcgcttaataaattgtcactgaatcaattacccttcctggaaacttccctcacttccctactgaacttaaggttcagttcaagcgctagatcccctaaaaagccctcccttatgtagatatactgcttaatgttttactgggacacaacctcagcaacttatttgcatgcttttcagaaactttttccttaaatatgttttcttttcattcctattacctcttaatttgaccgctcagtcctatttttaacctccacgtctccaaacacatttaacacattagagtatacatgtaagcattcaattaactcatgtagactacatgattgattgatcttggttaccattcattccatcaataaacattcattaagttcctgcatatttcttgaaacagccagcacagcattgaatacacaaatatccctgttctcttggagcttattatctgctagtaagagacgatcaagcaaaggaataaatgaataaatgaggaatacaagaatgttagatactgaggagtgctgtgaaaaaaagatgtgaaagggagtgactaaaggttaaaattaaaaataaaataaaataacggttgctgagggcctctctgaggagttaacagttggtctgagaccagaatgacaggtaggaacgtgttatggaaagatttgggagaagagcgttcagcatggtattgggctggaatgagctggacacattgagaattaaagggatgtgtgtgtgtttgagggtcatgatcgcaaggacttctgttcaggacatctgggatgtgagatgctgccaaggggagatacagcccagtgaagatgtcctttgagcaatatgtgttggaatcctggtggggggtaggggagagaaaggggcagaaccaaatataaaaatcagtatgtggtgcttatattttagaagtgttggtacccaaagtggcaatgtaaccatagaagagatggaaacccgggaccaagtcatggacatgtaaacctttttagagtaaagcagaagaatctactaaagagaccaagaaggaatccccagcaaattaggaagaaaactgggagaaaatgaccttgagaatgaagggctgtttgattgtgttgagtgctgccgagacgtctagtaaagtggtcatgggaaacttagcaatattggagttgccatcattcttacaagagtggtcatagtagggtcatggatgtggatagcaatctgcttggactgggtggagaagataaggtgtgagaaaaaggggaggcagcaaaagttaaccatttcaagaagttttattgggaaaaggaataaagagattgaagctggaagaaaattggaggttaagggaggaattttttgtttgttcttaaaaaaagtgttttaacagtatgcttgtaagttaatggacataaccaagtatagaggaatcaagagaaagatcgatgatgcctcaaggagaggtttaaaatgcggaagcaaatgccctgaaaagttaaaagggattggcttctaagatacaaatgacacagattttgataagcacaaggagtgactataaatatgaagactgtttctcattatggaaatatttctgtgttaaaatcttgaaaagctaaagtaggccaggtggagccgcatgattttgctgatttggtgccacgtttcacctgcaaaaagaccacttttctatggcccaagctaatatactatgaatataactataatatacatatgtaaaatagctcagaatacacaaattgaaacagatgatgagcttatgtgtgttttccattttctcttttgttaaaatatgtatggaaagttttaacataattttaggacaaatatatgggaaatactaaatacttctagaattgaatgttgcttatttcagcttggcttttaggttaagtcataatgaatgctgaacagaacaggcaaagacagaatcagatccctgtggttattctagttttatcagagcctttgtgttctcttctaaaggattaaagtgtctgctacatactgcaagattcatttccttaagatctttgtttcttagtgcctttgatgtaaaaaatttaaaattaaaatgaatccatgtattttataagatttctctttaaagatgtgtcagttggcttaaatatttatattttcttttgtcacaggcttatttatattcatcttccactgtgctatgaaggagaatgttcagaaacagtggcggcagcatctctgctgtggtagatttcggttagcagataactcaggtaaagagttgttgattaaattttacatctacaagtagatgggaaagtttgtcattcagtctttcattgtcagagcaacccagtcccagtggtagcaagctattgaagtggagcatgtgaagatgcgtagttggaatcatagaatatcagggctggaagagatcagagaactttgagcccaacccttctattctgcagaggagaagcatgaattccatacaagttaaatgagttgcctgaggtttgatgtctaatttaataacccgtatacccagaggttccactataccagactcacctttccacattttctagatccgcaattacattattaagcaaagagatttttctcagtattaaaaaaaaaaaaaaaactgaaaaaacctactttgtcttttttcttttctttatctttctttgtttttctttttactgtcagtggttacttctcatctttgggatattgaaagtgagattttaaatagtacgtatacaaggtcaaagtaagaaattatcaatatcctcttattgtttacatgtcagtctcttctctgagccattgccagcatatcagaaaatcagatgctccagataaataatgcagtgatgattttttcagagcagttcatattcccggtaaagcagattgatagggtgatgtcattttttttttcagattggagtaagacagctaccaatatcatcaagaaaagttctgataatctaggaaaatctttgtcttcaagctccattggttccaactcaacctatcttacatccaaatctaaatccagctctaccacctatttcaaaaggaatagccacacaggtgagtctaaagatgtcctcaagtttagttctcatcacattttcattgcaaaaattggcatatcatgaagattgataaatcacagtgcctaagagggtgcatcttttagatttatgaaaataaaaatccgtttgaagacgttatccaacacctttatgaatattttgtccttttaaaaattttgtaacccaaactctagctatataaccataataattcactctgtatattattgttacttcatcatttgattcaaaaacttggttatctttaacaattatggtattttgtttaaaaagttatatatttttaaaattaaaaattgaattacagattatttcagcatagtatgataattactggacaagttgtcttgggaacaggaagaaacaatatctaggatgtacattttatttaagacttaattccttaaccattgcaaatgttattgatgactgccctttaaatcactgattatatatgaaagaacataatatttagaaagtgacacagggctataagaaacactgtctttcataatatcctgttttttcatgatatttacaattgctgcacattctgacactgaacatgtatgtgaaaaatcctgacgacaccatggaaataaagaatattttaagccaggtgctatgacacatgcctggagtcccagctgctctggaggctgagatggtgggattgcttgtgccctggagttcaggctgcagtgagaaatgattgagcaactgtaccacagcctgggcaacatagcaagaccccatctcaaaaaaatagtaatattttgcagcacttgatagtgaatgatgtgaaaatgtgtaactttttcatgttttcaaagggaaataatagaattgctacttttaaattaaacccctggcagacagctgtcaacatttaaaacagagcactttcctaattaaagataattctaaaaggataatggaaataacttttaaatttttaatttgtttagctattaaacatgagcagaggtgaatggcacaaagaagattaatacttggctttttgcaaatagggagtaaggtgtgtgatgtgtctgtaattattcatattgcaaatacttgaattacagataaccctggtgtacatttgaatccatatacatgccctgtttgcaccgttttctatgtcttgccactggggtggccactgcctgggattcatgatagtgctatggaaaaagttttgagtgtttagacagttctttaattccaaaattaattaaaaatccaagaacttggagcaacttagaacagcagttcttaaagcttcttgaagtctaggacattttggggggaattgaatgaaggctgttgattctcttccagaaaaaaaaggtacagactttgaatcattttcacaattttgcataaaattagagaagtctgtgcacctctgcttaagaatacctgtgtaaataaattgataacaggggtatagcctaagatagattattctacttatttggtggttccgtggcacaaaatatttttgcttataatgaattatttttttcactttatttaaccaaacttaaaatttgatactcattttgcctccccttctaaaatacaaatacttaatgccttatcagttattaatgaataggaattaaaccaaatgaattgctttcctcttaaacagctgaaaatagctggcctgaagaaatgccactcttaaaagaggaaagaagataacaaggcagttaatttggaacatgaggcattttggaaatattaaggatagaaagggctataggattcgggggaaaacggactagaagataaaagaggaaatgcagagatggaggtccaaaggcagactttactattttaaaatattgtctgttcttcattttgttttatttcatctattattttattttatttatttatttattttgacacagggtctcgctctgtttaccaggctggagtgcaagggcacactcacggtagaggcttactgcagcctctacctcctgggttcaagcaatcctcctacctcagcctcccgagtagctgggactacaggtgtgcaccaccacacttgtctaatttttgtatttttgtagagatgaggtctcatcatcttacccaggctagtctcaaactcctgggctcaaggaattttcctgcctcagcctcccagagtcctgggattacagacgtgagccaccacacttagccttttgttttgttttttaaagaatgcattaatgttcttgtttcccttaacaaaaaacccttggggctaaatgggttcttgtcaactaggatgagaatatagttagttatatggcattacttcaatgttataataaatcctggtttacagtcaactgacttcacataggctttggctacccagacagttctcagtggaacagttagcatcctgggatcactcaaggtatgcaaaacgtcactgcatatcatcatggatatctagctggttcatttcttggaattgatctagatattcatatgtttatggtatagataatgtctcctatgagcattccttcaacaaaagtggatcactcaggtaaactttcgttacttttttgaatgcatgaattttttgcaaggtaataagagaatatgtgcatggattaagctaagattcttgctgcatcggcaaaatggcttgttcttttcagctagcacaatgacattcctgcattgagctggaatttctgaagttttgaatgatagtgtgtgctgtgctggctcttctctgcatggggtatctgcaagcggctccttctaggaaatgtaccatggtctggagtgagtggagcacatattatgtaaaataatgacagaaagcagtacttgagaaaagatttgttgtagaaggacatgaaatgctttatttttccactgctcatgtggatttctgggtatgtcatggtacattcatagaagtcatgtaagtgaaattgtgaattccaagcctgctttgtgagaattgttatctgcttgaaatttcagcataggtcaaataatagttcatatccctagcccctggttttcagacttgcaactataatcaaagtctttattacccataatgtaatatctaaccagaagactgggaatagcatatataaaaatacagccctcattcagaattttgctttgttaaactgcaaagacccactaaattggatcacattgttgaaatgaagcttttcaaaatctctaaaagtacatgccactggaagttacaaaggaaacagagtgactatatccttgatatctctctgaggatatgtggttttctaaaaacaccaagcactaattattcattattaatatataagtcaatagaaaaatccccaccagaaaaccaatggctagtgaatatatgaactgaaaggaagctcagaatcaatcagcttgctgagagcctaatggggaggggccttttgtcatgactccttgagccttttccttgccgacattggaaaatgcttcagttgttccaccatgcttcagtttgctcgttctctccatgaaccatctattcttctctctagcatcctttagtgtgggttgagtatcccatttccctttttagccctcattgtatttagtgtcggcttcaacacaagataatagttgagcaatttgaatagtttccaaagacaacagatatcatgatgatgatggcttttaccaattattgatggattttaaatgttttgtcacatactgagtccagcatactcaaaatgtaaaaagcattggagtgaagattccaattttagagccatgatttctaaaaatttttcaggatagagtttttgcctcttccacaatgtatggagaaggtacataggaaactgaatactttataaaagttcatatcttctttatcagtgtaaaatttctataatttggttaatttgagggtagaattttttcctaaagtgtatttggagagggaagtgcttaaaagatatttgtaggatacatgaagacaaccatacgtctttatagataatagagcataagtgggtttcagaacactatctgagccaattttagaaagcttttgtgtatagggaaataacatttaaatatatgatactgaaaattttagaaaaaattatttagcagtcctttattactatcagttgctataatattagtgctgttagcaataacatcattcagaaactacaagataattaatataaataaatcattttctattaaaatatttctggtaataactttgattgctacaattaaaaaaataattcacaagaagtaccctttttgctattttccagttgtttatccagctaaaaaccttgggaaaatacgttcaaagtagcatttcatatttattttcatttgcttgtattctccaaaatcctttaaatttaattttataaaattttttgttatgaaaagtgtcaaacctatataaaaaatagagaggatactattataaagccccttgtaaccatcaatttatagccagttatacacccctacccatttttcccttcctatattatttgaaaacatatcttagatataatttcttccacaaatatttcagcacattctaattccttataattttgtacatctttcaagccatagtgcatgtttttttgaagtggttttccaattattttttcattggctctgctacattcaagaatatttcgtatggtaagccacagtacaaattactagaagggaagttgacactcagtgactatcaggagtatacttagaagaagaaaaacatggaagtttagtgttgcctattacctaatataagaaagaatcggagctttattttcttttgttcttctttaatgtgcaaaacggagtatacaatatggtggcctgtaggcatgccaccagctcatcttgaacctaatttcttgtatcatttcttgcagacagtgcttccatggacaagtccttgtcaaaactggcccatgctgatggagatcaaacatcaatcatccctgtccatcaggtcattgataaggtcaagggttattgcaatgctcattcagacaacttctataaaaatattatcatgtcagacaccttcagccacagcacaaagttttaatgtctttaagaaaaagaaatcaatctgcagaaatgtgaagatttgcaagcagtgtaaactgcaactagtgatgtaaatgtgctattacctaggtaactgcatatatataaggaatgtattttgttaagaaggcttttgtgaaattcagaatttttctttttaatatatttcttccatggaagagttgtcatcactaaaacttcagtactgagagtaacatgactcagtagccacagaagctatgatttgtaaaatatataattgaatcagagtaatcataatgcaggggagacattcaaattagagacaagggagaagcaatgctgaggaagaccctagatagagctcattttactccacctaatcgttatatctggatatacccattttctgcatcttctttctcaacaataaaaaatgtaactattttgaatgcccacaaatcccattccagtgttactttctgtgaatgcagtaccatattctcattttcaatgacatttcaaccacaggcagaaaagactgtttactccttgacccaaagattaaaaaggattttttattattttaaatattacaccttcagaaccataacatgcttaagaaaactttcccaaaatgttgacctagttaaatgaggctatataaatttctaatattttacttattctattcaaggcatagggccaaagcattaagtataatttaatcccatacattcgagttaagtttagtgttgatgttccatcattctggacctcccaggagttgtttaagaatgaatctcttacacctctacttttgcccctctactgtatattaagcccataggcttgtgggaggaaggagaatttccattaggcaagctgtatgcagtggaattttccttttaggagacacacaattaagactctctggttctgtccttgctttggagactttaagacatttcctaaagcacaaataaaagcctcgtatttccccattgagagttttgttccaaggaatatgaagtgagacatatgggtgagtcataataatcaaaataatttatgaagagctgggtctgcaatagctagtctaaaaactacttgtgtgtcagtcctctggttatagtatataagagcctgaggaggtctggcaagatagatggtgtattatttatggatcaggctgctgcatacaaaccttgcatactattatgcagcttacctaactctcagactattctgagtaatgcttgcttgctaatgaatgtataggagaccacattgtaattgttcttagatgatggagtccatgcagtttcttagaaatcggtctcagtgcatgctgtgctttttcacatttgctctgggttatctgggaagtatcaggttctgggaggcaacagcattaagtgataagaaaaggagacattctggcaaagccaatctgcttaaaggcaaagtccagaacctggaacctagaggcctttctctctgcacgaaaaacaggtagtttgcagtctgagatatgggagagcttttaggctacacagcaacccaagggacctctcaccttttgctgagcttcaatcaggaagctatttgcctggctccagcagatgatgagataatgaggtagtgggttttttattactgttccattttgcaacatcctgcaacaccatcctgggagacaagagcattacccagcttggctttcacgggggagggttgtattcagtaaaaaagaatagtaaatataaggtcactgagattctaagtaagatagtaaatctaaggtcactgagccaaatccttttcaataggcatatattaacaggctgcttattttggcggaggttacatatggatgaaaatgaatcttagtcactgaatattcatatacatttcccccaaaaccttagacattcatagtagattttaattagttagctttctaactagtcagatttctgcccaaagtgcttagtcaatagtaattaagatatagcttcaaaaatggctttgcttttgatttctactcatattcgtatggctccagaaaaatatttttttcatatttgacaatgtcagctccactttagaaattttcaataaccagatgagaaaaaaattaagaaattgctcaagggaaacatttgtaaatggatttgaaagattgagccaaattctgttgtcagttctaagcatgcagttctcacctccatttagtcccccatcagaacagaggtcaggaatttagctggggagcctaaatttagttcagcttacctttgagaatagcatcaattcagactctcttttcattatgttttcttttctttttccctctttttaaactacattgtgttagagtcatagtctaggatcctgagagattttccattcttgtcaccattcacttgcattgtaaagattttctttgtctgttgttggcatagattcttttgtacatatttatttatttgtgtttatatatgtcaattggtttcctttcttagcttgatattgcctagctttgttgttttaattaactttctattagagagactgtatatattttttctaaatactttgtgaaatcatttttggtagcaatatctttgaatatgatgaataaaagtgactgtgagtgcaaatagaattagcagtaagaagctactctagctaatttgccattttacttaaatggaaaatgtttttcaaataaatacttatgttgttcatgttccaagttattcaattcctttatgagtgaatgtttttacttttgactcctaaataggaaaagattatttgacagctggaaaataacctgccaccaattaagcgagtgacatagggctactttgccaaaacactcagaatgagtatgttacacagatccagttcactaaggattaatgcattttgaagttcttagaatttgttgggatgactgatgcaaagccaagttctacagcagattaaaaataatacaggtttctttcggggaatgtcttcagtatcctcaaaagggaactgattcagtaacctgtagaagataggacctaggatatttttctcacatttatagttgctattttcattgtgagaggcttagcaaatgatacattttagcgaacttcacttacttgatgagaacagaacctccccacttccttttactgtagatatttaggataactttttttctgcagtgagccaaagcccaattttgcttactgccctactcagcaaagtgtatgcccagtgcaaagttgtgaggtgttttgacggtcactgctaaaccaggtcttccaagccaatgttcacaactcctggccaagccatgttaagaaaatagacaagcagctgcttaaggctcatctacagtcatttacatgcaggttacttcggaaagctggaggggtagaattggggaacaaatgaaaaacacgtatttgatttgcaggctgacctgtgttggtaatatttttgaaatctggaggaattggtctgtataaattcagtgttttggaagcacttctctgtttccagttgaataacattccatttctctcatataaaaacattaaatagctctctccctcctccccaccaaaatccttctcccctttcttctgttctgtctccctttttccttccctccttccatctttatttcaaggaagaataattagtgttaacagttctttttttgcttccctagagagaaataagaataaacgtgaaattttcaagtgtttgcatttatattctatatagcctgttccgcaaaagaaaaaaagtaaaaaaagaaaaaaggatgctttgttaccataggcagctccaacctaaattgagtaatctgaactatataggaaaaaaaaaaacaaaaaaacaaaaacaaaccatggacaggcacagtggctaacgactgtaatcccagcactttcgccaaggcaggcagaggtcaggagttcgagaccagcctgggcaacatggtgaaaccccatctctactaaaaactcaaacactagccaggcacgttggtgcatgcctgtagtcctagctactcgggaggctgagacagtcagattgtttgaacttgggaggcggagtttgcagtgaaagctaagatcgggccactgcactccaacctgggtgacagagcaagactccatctcaaaaaaaacaaaaatttataaatatgtttggatgccagatgtttatttcctatatcatggaattttcagcacagttctatgacatgttgttagttcactcttccatttggggaaacagatgattaaaaacagtaagtaacctgcctgtggccacagagacggtaagagcgggactcaaatctaagtccgtctgactctgttcattcttctacatcagcttccctagccacctccttcaaagaacctacagcctggtgaaggaagagaatccaaggccaggataaatgccctgatatccatttgtcagaagcttctggagcttcaggcaaaacctctgggctagcaaaccagtagcgatgatttggtctttcaagttctggtagattctgattggcctctcctgaaggtaaggaaagattctagacaaggagattggaaagtccaaagaaatgggtggaaaagagttgaggctgacttgattgcagggtgtcgaaaggggttgcagagggatgacagccattgtgtgaataacccaagtggctggctagagaagttttagcttagcagcaggcacaagagaggcataaaggcttctaggcaatgaaggaacccaatcctagttgggctttagggccatgactgtgctgggatcatcagaatgaagaggggctgaacttggagagaacagtgaggagccctttggaagagtcagcagagcagcaaggcaaattgaggagtggtgtctgggggtcacaggtctcagaagtggcaacgccgtcagaaggctttcaaagtagcagccatcccatgcattggtacagctaccttgccatattcagaacagcagggaacaccttggttgtatccagttggcacggagttagaagggccttgaaagaagcaagccttcaagagacaagctgcttatgtcaaaaatgtgggaaggtagagaagagaaggtaagctgtttaaaagagtattaacttaaaggaaagtgtcttatgaagtttaatttgttcacttgttttatggaatacaatattcgaaggcaaaatgaaaggcatcagaagagagtgaatggttggtacagcaggctcctagaggtgagaggagaatggatgagaaacagaagaggcctatcttcttctgagatcaaaaaacaggctattagataagacaaaggtgcaggtattggagaaagcttgttgagtttcctaatttttgttcagtaaaataattagaggctcatttcacctgctgggtattgcaagatagaaggtattaggatggggacctgagtaaaagttaaaggatttggaacaacctcccagggaatgcaaatccctggcaaaattacattaaataaataaataatgtttgcccttagggtggcttttaaaaggatagtagccaaatcattttattaaaatatttttatttgctgtgttttgaaaaaccaatttgtttcaaggtcataactaaacacttaatattctaaagtctcaaaccttattggtcaaggatgtattttaatcacttgtaaataaatggacaatgaataatttcagatacactgtaaatcttttgaatcttttaacttacatattctgtttgacttgactttttttcattctgaatcactgaaaatgatttttataaattcagatgtcaattagaataaaatatttgatattctctttttttttgcttttgttttgtttttgttttttgagacacagtctcactctgtcacccaggttagagtcaggtggcacaatacagctcactgtagccttgacctcccaaacctcatgtaatcctcccgcctcagcctgctgagtacctgggactacaggcatgtggcacctgtagtggaatattttgtgtagagaggtctacagtgttgcctaggttggtcttgaactcctgggtacaggcattcctcccacctcagccccccaaagttccgggattacaggtgtgagccacctcactgggcctgatataatcataaatacattttaatattgatacttgtagtatctggttcacactgcatgtgaaaataacaaaatcaagagtttaaataccctaggagcaaaagaaagacctgtagaacactggaacatttttctgtttcattgtcctaagcctcaatctatcatgtataccaagtaacttccgcccttttttggttctcaggggttgcaaaataaagcacagaaccttcctaggaagagttcactggccaagagagatgatagttcttacacattcaaaactatttaaactcaaagaataattggtttatttataaagatctaaaatgtaatcagtgatacccaactagagcaaatacattctctgccatagcacttaactgcattaaatattgccttaaatttgacaccttatatatattgtgtgtgtgtttttaaatttcatgtgcatgtgacttttctactgaataatattattaaacttctgtgcattgggttatgtttatagtcatcattttgataagcagtagcatactgcttagtcacgtaacaggtgcttggttaatatttattgaattaaattggaatgtgtagttgacctggtccacttgcattgtatattttagaaaagtagatgttaaagtaccttggatttttgtggtttgcaagaacatggactagaaataaaatgcaaagaaaaaaagtattagctttatgctcttcaagcccctttatcccagttgctgtatgttaccctatatgatacaggcaaatggttaagaacaaaaagacagcaattttatagtcactgtcaatcttttttaatggtattgtgtccagaatttattccttccggtgggttcttggtctcgctgacttcaagaatgaagccgcagacccctacggtgagtgttacagctcttaaagatggtgtgtccagagtttgttccttcaggtgttcggatgtgtccagagtttcttccttcggtttgtggtcttgctgacttaaggagtgaagccacagactttcgcagtgagtattacagctcttaaaggtggcacatctggagttgtttgttcttccctcctcccggtgggttcgtggtctcgctaacttcaggagtgaagccacagacccttccagtgagtgttacagctcataaaggtagtgtggacccaaagagtgagcagcagcaagatttattgtgaacagcaaaagaagaaagcttccacagcatggaaggggacctgagcaggttgccgctgctggctggggtggccagcttttattcccttatttggccccgcccacatcctgctgattggtccattttacagagtgctgattgctccattttacagagttctgattggtgcgtttttacagagtgctgattggtgcatttacaatactttcgctagacacagagtgcttattggtgcatttacaatcttttagctagacacaaaagttctccaagtccccaccggacccagaagctcaggtggcttcacctctcagtatcaggaaaggaactggctggactcaagtctgagatgaatatgcagaaaatcctgcttttgagcagttgtcttgggaactgttttatggctcaagctagctttaatattagaaatttaatgtaagagcacagagggacctcatagagcccagcatccaggggtgcagccagactttgggggatgtaggaccaagggatgatggctttggtcatcaagcagccattttctttgtgttgctgttgttgctgctgttgttttaaagaatgttttagtgccattttggttcacagcaaaattggggaaagcagcacagagatttcccatatatccccttccacaactcatgcatacttttcattatcaacatcccccaccagagtagaacatttgttacaattgatgaacctgcattgacacttcattatgacccagagtccatagtttacattagggttcactcttggtgctgtacattctatgggtttgggtgaatatataatgacatgtatctaccattaaagtatcatacagaaaattttcacagccctaaaaacttctgtgctacatattcattcctccctccccactaccccttcctcagcaactactgatctttttattatctttatagttttaccttttccagaatgtctcataactggattcatatggtaggtagaattttcagattggcttctttcacttagtaatatgcatttacatttccaccatgccttttcataacctaatagctcatttctttttagtgctgaataatctgttgtctggatgtaccacagtttagtttccactcacctactgaaggatgtattggttgcttccaagttttggcaatgatgaataaagccatcataaacattgatgtgaaggtgtttgtatagatgtaagttttcagttcctttggataaatatcaaagagcatgattgctggcttgtatgatgagtatgtctcgtttggtaataaactgccaaactgccttccaaagtggtgatgctatcattttcatctttgctcttttttccatatctgcagcagactagcttcctttctacagtatcatacggagtatttttgctgccctaaaaactctgtgctctgcctattcatcactctctcctccagcccccaggcaaccactgatctttaatttctgtttcttcagagttacatgttatatggggtttgatattaccatggtacgcattctggcctcagtcctaaacataaacatacagctctggttctcaataccaaataaccgttgtttcagtgtctcttcatttaaattcttgagaaagatccatgattaactcagctttaatcaagtgtctacacctggtccaaggacacttggtatgaatatggctgctgagactcacccattcaaaagaagctgtggagaagggaaggggcaaagttgctaattcagacaggatgtttatttagactgtgttcaattatgataaatgatgcaaaaaagttatttattaaagagtgtcagttaactcactgtgttagcttgggtcacccaggaagtggatgccaaggtggacttaggaattccagctgtttattggggatagtgcctgtgaaagataacagaaaagggagcaggagtaggcaaggaaagcctataaaaggagagtaggaaggaggaagacaaggtagaaatagcctcagactgcagtataattctgaggaagtcctggccagcccatcaaggagatccagcacaaagatttctcattgaggagtcccattctggttggaaatgacctccagttattgactggaggccacgtgggaataggatgttcccagctctaagcctccagcagacctcaaaagcattgtatctggaagctgtagcctgactccactcattacagcaagttctttgaaagatccaagtgggatacccctgtggccatccccatattcagaaaaatccaggatggctagagcctggcttgaaggctgtgtaaccaggagcaatgctaagattaacctactggatggctttgatcaccctggtggattggctaccaagtgcttctggatacaggcatggaaaacagaattctagtgagtaatatcttcagccagcgatttacaaagaaaatgagttttacaaagaaaatggaagtttagagattaactgtgaattctaattatcatattttcctctatcaattttactatgtaaaatcaagagatggtttagaaactatgctgaattgagcaattaacatgaccttgaagaaggcatttaaaaattatttttcatcctcatttgataaattaatcagtttcctcaaatggttgttagcttgttgagagaataattgtaatttggctaacaaaaatccaatatttgttagaactgctctgtgtgaacttctgttaaatctgttttgtgtgtgtgtgtgtgtgtgagtgtttttcctgttaatttgttgcaattgaagaaaagtctgaagtcccaatcagctattagcctgggttctattactgtctagcagtttctgacatgagaaaaccatgttacatcatgccataagtaaggttgttaagctgtgatactgttaactagtaaggaaaagaagaactaacagagacctcaaaaataacaccacatatctacaaccatctgatcttcgacaaacctgacaaaaacaagcaatagggaaaggactgcctatttaataaatggtgctgggaaaactggctggtcatatgcagaaaacagaaactgaaccccttccttaacgccttatacaaaaattgactcaagatggattaaagacttaaatgtaaaacccaaaccataaaaaccctagaagaagacccaggcaataccattcaggacatagacatgggcaaagactacatgactaaaacatctaaagcaattgcaacaaaagccaaaattgagaattgggatctaatcaaactaaagagcttctgcacagcaaaagaaactatcatcagattgaacaggcaacctacagaatgggagaaaattttcacaatctacccataggacaaaggtctaatatccagaatctacaaggaacttaaacaaatttacaagaaaaaaaaatcccatcaaaaagtggatgcaggatataaacaaacacttctcaaaagaaggctggcagccaagaaacatgaaaaaaaaccttgtaatcactggccattagagaaatgcaaatgaaaaccacagtgagataccatctcacgccagttagaatggcaatcattaaaaagtcaggaaacaacagatgttggagaggatgtggagaaataggaatgcttttacattgttggtgggagtgtaaattagttcaaccattgtggaagacagtgtggcgatgcctcaaaaatctagaaccagaaataccatttgacccagcaatcccattactgggtatgtacaccaaggattataaactattctataaagacacatgcacaagtatgtttattgcacactatttacaatagcaaagacttggaaccaaccctaatccccgtgagttatagactagataaagcaaatatggcacatatacaccatggaatactatgcaatcataaaaatgcatgagttcatgtcctttgcagggacatggatgaagctggaagccatcattttcagccaacaaacacagggacagaaaaccaaacactgcatgttctcactcataagtggaagttgaacaatgagaatacatggacacagggaggggaacatcacataccagggcctgtcaggggtagggggaaaggcaaggcagagcattaggacaaatatctaatgcatgtggggcttaaaacttagataatcagttgatgggtgcagcaaaccaccatggcacgtttatacctatgtaacaaacctgcacattctgcacatgtatcccagaacttaaaatttttaaaaaataacaggaagggcattaaagaaaaaaaaaaagaaaaagcagtcgtatagaattactattgttaaggtttcaaaaggtagattgatcccattttgctaaagccaacagttccttcactcttaaaacttatataatgctgacaaagggtcacaggcctaatttttaggaaatactcattctgccagtaatagtctgtgccatatgactttactatgtcacttaccagctctaggccttagtttacttctctgtaaaataaaggaggctgattattatagctaaaatatatttaaaataaatagctaaaacatattcagcacttgagtgctatgatttcctttacttctttaaaaatgctagtaatttccatataaacacaaagtccaaagatctaaaagctaaatgtcaacctagatgttgaccttgttcaatctaaatttttcaagggaatacatgtatcctattagtttgctgcagaagtatttgcggcttttgtcattaaaatacttatgcaccaacttaaatatatcttttaatttccaaagtaaattactttcctatacatacaatttagtatttttgagactcttattaagtcttctagggataaaactagtaggaagattcactctcaaatacaaaagagaagatggcccagcagtaaggcaatatcattgtaaaaagcagagataaaaccctgtcttttagcaactttgtcaaattaatgatcccccccaacacaggtaccaaaatcccatttctcttccccagctgtgtgttaccacacggtgcaaagtcactggggaaaagaagaaaacagatcagcaggaaatatgaagacagcaagcaaagcagatttgacagttgccaagaagtggcctcagatgtgcaatccgggatctcttgctgggcaaatgagaaaagcaaaaccaaaaggttctgttcagtaaacgcacatggatgtgccccactgcacagaaccctgtgtgtacctttactcatgggtgcctagagcaggtttgcattcaaattagaggaagctgtgtgcatataaactatggtggggtgtgtgtcggggggcgcaattcttagccatagaatccattgccagagatccaagaagtgctttaaagagattatacttcatgtgattgcctttcacgggccctgagaatctccttgtaagttacatcaaacacgagtttacagacatcatgacaatgggaactcaccgatggcaatgaaaatatggggagtggaacaggagcagcagtgcttgaatgacagaaatcagtacagctgctagattagtaaccacacatttttaaaaactaacatatattgtgaaaataaattgtcactatcttgattaatccatttctgtttaatagttaacattttaactgaagataataaagactaatttcttcaaagtttttggtagataactatatatatacctcactatctgactttttaaataaaatgctcagaattgcaaagaggatattttcttttcaggaattattccagacaagtactccaaacataaaagttagaaaatgttttactaggccttttccacagtaacagaaaaatcagtttatagttatgagtgttgggctttctgttttccttatccacaaaagctataaggaattgctaacatagttgtggctttcattcttccaaataattcccaattcacttggaaatttctttttattccaaaagatctttttcctatcatttgctttgctattttatatagtcagtgtttactcaataaaagcatttgaagtttaaaaaagcattctctcctctaatctttgagttagatttttcccatatctcccttggcatgtgttgggatgaaagtggccaggactcaaactagaaaataggtacttgttttcactttcaatctgcttattccagttcagagtcatgggtggccagagcttatctggcctctccttgtcttcacttcctcgtttacgttcgccaatccaatcagtatgagagtgaacctcagcaccctctgggttcttcctgaaataattataatcatgcaaagccttgctttcttcatagtcacaacaaaatggcaggacaaatcctctgttccctaatccttccctccttcaaaattctttttgcacaaacctctatcaatccagggtgggtgtgggcaggacccagaatttaatgtttcttgagtgataatggtgttatattattttctaaaatgcatcgaaatgagctgttaggtttcatgaaacattccttcactttaaaattgctccatatgtttaagcaaatgaaaagggtctcctaaaacgcctagaagacaaatttagtccctatttgtttctgacacagagatgaaggcaactctagagtccaactgagattattgctttctttcttgaaccctgaacttcaactgcattcaaccaggatgcagttggcatcttctggaaaggattatttgttcacttcttagcaggctagttttaatttcatatgaaggcagaaagactcttttgtttccattgctgcattgaataggtgtgtgtgtgtgtgtatatgtgtgtgtatacagcaggtctttgaataaagttgtttcattcaaagttgtttagttataacattggtgagaaaaaacattgattccaggctggggcccctgcctgtgtggagtcttcatgctctccccattgtccatgatggttctctctggcacctctgctttcctcccacatcccaaaggtgtgcctgtgaggttcatctgtgtgaggttcacatggtcccactatgagtgagtgtgggaatcggtgtgggtgtgagtgtgccctgtcatgggatggcatcctgtaccaggtgagttcccacccagataggctctagctgcccatgactctgaactggaataagcagattgaaaaaatgaatgaatgaatgaatgaatgaatgaagacaaatgattgtaaacatctgtcaagtctaggataatcatccaaatgcacagcaataaatgatgcagtacagtagcactcagtgagctgccatatctgtgggattgtgaactgtatgaggggaggaggtgctccttacaatttttgctttgcaaacctttatttcttgatttaactcaccaccattacaactgccatcactgattcaccaaaaattgagtaaataattatcttgtgttcattagtctttcttaaatatatgtatagctcacacttagttcaatgtttaatattagaaatattttgtctttatttagaagtttgggaatgttttgtgaccgtaaatgttgccataggaacttaactcttggttgtatcacttagcctgtggtaaaattggttttgttatatgtcattttgcttaaagttgcagtttccagaaacctatccatgatgttaagtgaagatttactacatacatatatatatacacacacacacacacacatatatatatcattacttgtaagtattacatatatataacattacatatctatgatgttaagtgaagacatagtacacatataaaacattacttgtaagtattacatttatataacgctatatatatatatatatatatatatatacatacacacacacacacatgcacacttactacttatattacctaacattattgtattagtcagggttttccagagaaacaaaaccagcaggctgtgtgtgtgtacacatagaaagatttattttagggaattgtctcatgtgattgcataggcttggcaaatccaaaatgtatggagtaggccagcaggctggagacccggggagagttgcatttcaattccaaaggcagtctgctggcagaattgcttattgcttggggagggcagtcttttctatttaggccattggcgattggaagaagcccacccacattatagagggtaatctgctttactcagaggccacagatgtaaatgttaatctcatccaaaaagctccttcacacagacatccagaataatgtttgactgaatatctggccactatggctcagccaagttgacatataacattcactatcacaattatataacattaataggcactatgtgcaagacactttttgcgggatggagtgacattaaccacttcatctatcccttcccattcttggccctacataaagagagaatactttggaaagcaaatactttagtaccttctgtggtttaaaaggagtagtgctgactcatatctttagaaactgtctctaaaaaggctagaagtttggagagtatcttgtagctagcataatggaaacagaaggagatcacatggctttgtcatcaactcagctcccagcttctctgggctattttctttctagtacctttccattattttagttacaagatactctccaaacttctaggaaaattattccaaaatatcattaattttaaatacattaataacattgatggttctttctgtctcctagtgcaatttccttacatcaatggatgatagtatgatgtggaaacagcaaaggattttcttttaagaaaaatgtctggactgacaactgtcacttactaggaagtatcttaatctttccaaacctcagttttctcaactgtagaatgggaataaagttggtaatgtccatagctacctcacttgactgtaaagaacaactgagataaatatgtggcagtatttgaaaaatgataaagcatcgtggccttggttgttattctcactttctattaagttcagttatagaaccttgggccccactcaagggcccagttttcttagcatgggtgtggaaattgtgactactaaaaaacaggcaacttttatgtctacaggagattactaacttattatataggaatttgaccttcatcttggtagaggggatttcatcctggtggatctgcagccctacctggaatatgctgagcttcatattgtcaacttcaggcaaatgcttttctcctccagtacagccattcttctctgcattcattggaacactcagaacattattagatgtaccttctgtcttatctggatgaactaaaaacagaaatgggtagttttatagttttataatattttataataattgtataataataggctttgttgcttttgacaaaaagaactatctgtgatgcaagcaacaatcttgtgcccttaaagcccatgtcctcaaatactaaagtaaacctaaaatcttagcagtgttctttaggtgttgcaaagtgttagtaggaaaaatcctaactgtgcaatgtctccaaagtttgtggagttttttcctttaaggatattgtttctagcttagctgaagttctccatctctatggggatttcctttcacccactactagtctttaagaacatttcaattttactgctatcaactgcaatttcgtactttgataagattcattactgtaccccatcctgatctcttttcaaaatattgatcaactagattactaaaataatcaaaataatagtggaaaagctttctgtttatccttcacatatatttctattagttggtaaaatcacccacatccccactaagtcctgtaccaagcataaataccacatagtataacaagtactaagaatttttgaaacttaatgttactgttttatcaacctgaatggaaaactattttgcatttttttcttttctttttgtacttctgaatttgtgaagtcatatcttcaacaattcattcaaccaacttttattgagaataccatattgtatgtgcctcaaatcatcatacacagagcaacttgatgagttttcctaaatctaagctctggctgtatcaccccaaagccccatcattgcctattgaattaagtcagattcctttcctagaattcaagggcctccataatgcatcgataccatgatccaactgagctgtcttcccacatatgtcctgccattttctctgtcttggaatgttctctctcttggtatcttttttttccagtggtgcccatttgaaatgcctccttttccatgaagtctgtcctgtcaccaaataaatgtcatttctccatttataatagatccttagcctgtttttattccccctgtaccatagtcatctttgagctttcctagtctactctgtgaaaactgtaagcttctataaagcaggagctctgtctcaaccatatcactcattcaggcacatttcagaagcatacagtatttcttagaggatgacagcagggaacccagaaatattttttaagttcttttgagtccttgtattttcaaggttaacacaattccattttagtaaaaagcctctgtaatctcaatatatatgagtagattgttttttctggtagggatagagggaaataatgcaatgtcaatgtggcactaggtaacacattaattatgagtgaagtgattctatgatacaaatccactgcatgaaagcaacagttggagctgtaaagagacaggtcatttctaggttggggaatggtcaggatgggtgtattagtccattcttgtgctgctaataaagacagacctgagaaatcatggcagaaggggaagaaaacatgtccttcttcacatggcagtaggagagagaagaatgagagccaagtgaaggtggaagccccttataaaaccattaggtttcatgataacttactctctatcacaagaataacataggggaaactacccctatgattcaattaactgccactgggttcctcccacaatacatggggattatgggaactacagttcaagatgagattcgggtacagacacagccaaaccatatcattccacttctggcctctcccaaatctcatgtcctcatatttcaaaacacaattatgcctttccaatagtcctccaaagtctcaattcattcaagcatttacccagaaggccaagtccaaggtctcatctgagacaaagcaagtcccttccacctatgagcctgtaagatcaaaagcaagttagttatttgttgatactatgggggtagaggaattgggtaaacacacccaatgggagaaattggccaaaacaaagggccacaggccctatgtgaggccaaaatccaataggagagtcattaaaccttaaagttccaaaattatctcctttgactccatatctcacatccagggcacactgatgcaagagttcggctcccacagctttggaaagctctgccccctgtggctttgcagggtatagccctcctcctggctgctttcatgggctggcattgagtgtctacagcttttctgggcaagcggtgtaagctgtcagtggatctaccataccaggatctggaggacagtggccctcttctcacagctccaccagacagtgccccaaaagggacactgtgtgggggctctgaccccacatttccattctgcactgccctagcagaggctctccatgagggctcagcccctgcagcaaactcctgcctggacatccaggtgtttccatacatcctctgaaatataggtggagattcccaaacctcaattcttgacttctgtgcacccacaagcccaacacaacatctaagccaccagggcttggggcttgaaccctctgaagcaatggcctgagctgtacattagcccattttagccacagctggagctgaagcagctgggaagcagggcaccatgtccctgagtggcatagagcaggggtacccccaggcctgggccacaaaaccattttttcctcctaaggctctaggcctgtgatgggaggggctggtgtgaaggtgtgtgacatgccatggagacattttccccattgtcttggctattaacatttgactccttgttacctatgcaaatttctgcagccagcttgaatttcttcccagaaaatgggcttttcttttcttttttttttttgaaatggagtcttgctctgttgcccaggctggagtgcagtggtgcgatctcagctcactgcaagctccacctcacaggttacgccattctcctgcctcagcgtcctgagtaggtgggactacaggcacccaccaccacacccagctaattttttgtatttttagtagagacggggtttcaccatgttaaccaggatggtctcgatctcctgaccttgtgatctgcctgccttggcctcccaaagtgctgggattacaggcgtgagccaccgcacctggcctggacttttcttttctattgcatcatcaggccacaagttttccaaacttccatgctctgcttcctcttgaatgctttgctgcttagaaatttcttccgccagataccctaaatcatctctctcaagttcaaatttccacagatctctagggctgggaaaaatgcagccaatctctttgcatagcaagagtgacctctactccagttcccaagaagttcctcatctccatctgagaccatctcagcctggactttattgtccatatgactatcagcattttggtcaaagccattcaactagtctctaggaagttccaaactttctcacattttttctatcttcttctgagccctccaaactgttccagcctctgcctatgacccagttccaatgtcacttccacattttcagtatctttataatagcaccccacacctggtaccaatttactgtattagtctgttctcacgctactataaggatatacctgagactaggtaatttataaaggaaagaggtttaattgactcacagttccacagggctggagagatctcaggaaacataatcatgtggaaggggaggcaaatacgtccttcttcacgtggcatcatgagagagaagaatgagagccgagtgaagcagggagccccttataaaaccatcagatctcatgagaactcactatcacaagaatagcctgggggaaactgcccccatgattcaattgcctcccactgggtccctctctcaacacatggggattacgggatctacagttcaagataagatttgagtgggtccacggccaagccatagcaaaggtcttgggtaggacttaattcactgaagtgatcttaaaatgttaccttcagctactaagtttgtcaagcagagggatgttcacaagcaaggacataaagaaattaaactgcgagattgttgaggaccttcaatgaatttgggatggctggtttatggggtgcaagagaataacatttaactaaatgaaagagccaattatggtgcaagttctaaggccctgagtatcattactattgcttatctctatatcccaagcagcaacaaacacaatgccttacacatagtttgtgttcaattaatgtgtattacatttattcattaatttgtattagtctagggcttttataatgatagtttagtttcaccattttttttgagtagtcttaaaaaaaagtctctctctgtaccttcttcaaccaatctacaactaggttttttgtaggaattttattaatagataccaaacaatgtaacatctttacatgcagattccaaagataccctagaagagcagagggttgcacttcctctctctcactttgcattcctcctaagaaatacttgcccctaactcaaagggcagaaggagtcagggctctttcagcattaaaattctctatagttttctgggagaggcacatgttctgagtgtgaggagaactgttctggttattgtttataaattgttttcatcttctatttcttataacagattataaatttatgttttctgatgcttcatactattatgaggatttggttggcaaattatcttacaataaccacccatatattcatgcatggcccaattcgccttcctttgctttcatatgtagaatttccttcatgatgctttctaaagagaggtaagatctcccgcctatgtaggtaggtcgagcacatttgctccaaataaatgaagatatttcacattttctttttcacactcacccacaattcttcttccagaggtactccactaaattgtttcttactttgggacaatactaatatggttccttgcaatctttctcttataatatatgctaatataaaagcaaagttaaatatattcatatattcagagttgcttattctcctgatttcaaatatgtcagaaagctcttaacacatttagttactaatcctcaaaaccaacaaaatagatattcaaagattgcagcatgatctaatggagaaaatgtaaaatcaataagccaaaatttttatatgataaatggattcattaaaatctggatgtgaaaaaaaaaaccagttttggtgtcttccatttttgtgccagaccatattgtcccttgaatcattttaacaaatgagaaagtacaaacacaagagtcaaaatatggttagcttccatgcaccttttaattcctatgaaatacaaagagcaaactattcttagatattacttgcattgctctcagtctgcctccgaaagctgggaaaaaaacaatgtccagttaaatcctacaacctgagctggtgttacctgttcctgttggaggcaaatgacaaaacgtatatctactgcttcattgaatgtgctgcagcagctgaaggaagcctcaccccagtcctccctaccccgttctactttttcctgggtctatgaaggcagaggaaatgtacccaagtttccgtaattctttgctgagtaaaggcccttgtccaggcacttgtgtaatcctcaaataaaagaacgaatccttccaaatatattcggaatcagcagagtaaatcagcagggtccctaaacaacagcaacagttcaggtagaagaacttgcaattttaagcaaataagtaactattttacaaaaaaaaaaaaaaaaatgcaactactgatcagtggcagaacgtaaatggaaaaaaatggtcatgaaagttatcaatattgctttttcttataaaaaggataaatgaaaacatgaaactaggccatatgaagttcaggcctctgtcgtcaatcttccaatgccatagtggacttcactatttttaccctggatttctaaattagctttctaactgatttatcgctctcactgtcctccttgcagtctatcttctataattctggaatgatttatttttctcaaacataaacctgatcaagtcacactgccctgctgatcagtccgttcaactcatttctgcctgtatttctatcctttcctgttgtgtcttccattgtaggctttactttctccacactgacatgtacacagtgcctaaaattactatgatttttcacttacctgtatgcactcactatctcatatttcatagatcctataagatttgctatacttttcttaaaagcatttcctgaccaacagaccaaacaagggtagaaacaacccctgctcaaaaaaggcagaatgcatgctaatcatacccactttaatgttgcccttgattttacagcctcacatttgcttttgactgtgcgtttgctgaagacaggaactgtgtcttgtcaatcatgtatcctcagtgcccagtacagggcttgacacaaagcaggcaacaaaaatgttttcttttattgtgtttttccataaataaatcctttaaagagtggaagagacagaaaagaaaatgaatggcatacaatatcaattgcagttttgatgacatctctatacctgtagtgaatatgatcatgatatttatgctgaagatttaaatcataagagaaaccttaagaaatgagtggcagtgttgggaaaagtgtgatgataaggtgggtggcagtctcaacctgcacactgctagatatattcagaaagatgaattcatgcaggctggacagacatttcagatgtcaacccttccagaccaaaactggcaaaagcaattgaaaccatagcagagaaatacatctaaaagtgaatatgtaagagcactctactagaaaaccattttaaaaataaataactcaaagctgaggattatggagactaaacatatagttaagtttcttggcacaaaacagtaagatgaccagactacatttaacttatagagtctacttcctttaaaatgtcatgagcagtcaaaagaagaaatagcctttaattcttcctccaagagatatctttctatttggctaagcagaatttgaaaaattgccacaagcaattcaaattaaaatttaagtaaatgttggaaactggtcctgtttggacaattatccaccatccaggataatttgtgacagtttccattatgttttctgttatgcaggaaatgaaagtccacatgtttaagaaaaaaaatactattccacttgtctgaaagcaatcaaggcaccttcctgacccatatttaccaacatctcttataaaagtaattcttatcatgaaaaaaactattacaatacaaatgtactaaagagaggtatataatatatgatacagtagtaaggactcactttatacgaccttcgaactcgtatcaccagtaatgaacatttcccatggaaaggtaaatcatgtatttttggtctcctttttttgtcctgttatagactggttctaaaagccactggcttacacaaagttttgaaaaatggtggtgtaagcaaagaaagcataaagaaagcagtctgttatcccataatcacagactctcccactgggtagacaggactctctaggacactgtttaaaaattgtgttcccaagaccatcctggctaacacggtgaaaccccgtctctactaaatacacaaaaaattagccgggcgaggttgcctgtagtcccagctactcgggaggctgaggcaggagaatggcgtgaacccgggaggcggagcttgcagtgagccgagatcgtgccactgcacttcagcctgggcgacagagcaagactccgtctcaaaaaaaaaataaaattgtgttccatgtgtgggctgtaagggggctgatgattcccaaaatctatttccagttgttttcatatggtcatttgtcaggagagggagtttataaattttatctgactctcatagtattaggtgatttcctccccaaattaagaaagaaggaactcatcccaacacctctttagccttgagtaatgcaccttgtagctcaatgccttgtatttagaatgctgccctggaatactccaagagaaaatttggagacaatggatgttattttccaaagaaccttctgggtctcaggagacgcagctgcttgtttttgtattttaatgttatgtggtttgctacatgctgctagaatggatggagttggggaagcctggttcacctgagcttgttttgaaatgaagatatgcctttttatctgcaggaagacagcagcagggttaggctctgttaatcaaaactccagtgctggctgacttctaaggagatccattgtcttaatccattcaggcaactataacaaaataccatgaacaaggtggcttataaacagcatttatttctcacagttctgaaggctgaaagtccagcatcaaggcttgccagcagattgagtgtctagtgaaacccctcttcctggttcgtaggtggtatcttctcactgtaacctcgcatggtaaaaggggacagtgagctcccttggggcatatgttttaagggcactaatcctattcatgagggctccaccctcatgacagaatcacctccccaaaggccccacctcctgatattgtcaccttgggagttaggatttcaatacatgacttttgggggcacataaacattgagaccatagcacccaagagaatccaggagaaatattccaagagaatccttctgaaacccagctctgatggaaaacgatccagttagtgattgcagaatcccaagaacatgatcaaaaccctattataaagcctcaggaaagctgcaataatagtgggaaaactcctgtgatgaggaactagcactcttcataaccacacttccaattttggatc

SEQ ID NO: 608 - protein, 737 aa, Homo sapiens
MGGCTVKPQLLLLALVLHPWNPCLGADSEKPSSIPTDKLLVITVATKESDGFHRFMQSAKYFNYTVKVLGQGEEWRGGDGINSIGGGQKVRLMKEVMEHYADQDDLVVMFTECFDVIFAGGPEEVLKKFQKANHKVVFAADGILWPDKRLADKYPVVHIGKRYLNSGGFIGYAPYVNRIVQQWNLQDNDDDQLFYTKVYIDPLKREAINITLDHKCKIFQTLNGAVDEVVLKFENGKARAKNTFYETLPVAINGNGPTKILLNYFGNYVPNSWTQDNGCTLCEFDTVDLSAVDVHPNVSIGVFIEQPTPFLPRFLDILLTLDYPKEALKLFIHNKEVYHEKDIKVFFDKAKHEIKTIKIVGPEENLSQAEARNMGMDFCRQDEKCDYYFSVDADVVLTNPRTLKILIEQNRKIIAPLVTRHGKLWSNFWGALSPDGYYARSEDYVDIVQGNRVGVWNVPYMANVYLIKGKTLRSEMNERNYFVRDKLDPDMALCRNAREMGVFMYISNRHEFGRLLSTANYNTSHYNNDLWQIFENPVDWKEKYINRDYSKIFTENIVEQPCPDVFWFPIFSEKACDELVEEMEHYGKWSGGKHHDSRISGGYENVPTDDIHMKQVDLENVWLDFIREFIAPVTLKVFAGYYTKGFALLNFVVKYSPERQRSLRPHHDASTFTINIALNNVGEDFQGGGCKFLRYNCSIESPRKGWSFMHPGRLTHLHEGLPVKNGTRYIAVSFIDP

SEQ ID NO: 609 - DNA, 3503 bp, Homo sapiens
atggggggatgcacggtgaagcctcagctgctgctcctggcgctcgtcctccacccctggaatccctgtctgggtgcggactcggagaagccctcgagcatccccacagataaattattagtcataactgtagcaacaaaagaaagtgatggattccatcgatttatgcagtcagccaaatatttcaattatactgtgaaggtccttggtcaaggagaagaatggagaggtggtgatggaattaatagtattggagggggccagaaagtgagattaatgaaagaagtcatggaacactatgctgatcaagatgatctggttgtcatgtttactgaatgctttgatgtcatatttgctggtggtccagaagaagttctaaaaaaattccaaaaggcaaaccacaaagtggtctttgcagcagatggaattttgtggccagataaaagactagcagacaagtatcctgttgtgcacattgggaaacgctatctgaattcaggaggatttattggctatgctccatatgtcaaccgtatagttcaacaatggaatctccaggataatgatgatgatcagctcttttacactaaagtttacattgatccactgaaaagggaagctattaacatcacattggatcacaaatgcaaaattttccagaccttaaatggagctgtagatgaagttgttttaaaatttgaaaatggcaaagccagagctaagaatacattttatgaaacattaccagtggcaattaatggaaatggacccaccaagattctcctgaattattttggaaactatgtacccaattcatggacacaggataatggctgcactctttgtgaattcgatacagtcgacttgtctgcagtagatgtccatccaaacgtatcaataggtgtttttattgagcaaccaaccccttttctacctcggtttctggacatattgttgacactggattacccaaaagaagcacttaaactttttattcataacaaagaagtttatcatgaaaaggacatcaaggtattttttgataaagctaagcatgaaatcaaaactataaaaatagtaggaccagaagaaaatctaagtcaagcggaagccagaaacatgggaatggacttttgccgtcaggatgaaaagtgtgattattactttagtgtggatgcagatgttgttttgacaaatccaaggactttaaaaattttgattgaacaaaacagaaagatcattgctcctcttgtaactcgtcatggaaagctgtggtccaatttctggggagcattgagtcctgatggatactatgcacgatctgaagattatgtggatattgttcaagggaatagagtaggagtatggaatgtcccatatatggctaatgtgtacttaattaaaggaaagacactccgatcagagatgaatgaaaggaactattttgttcgtgataaactggatcctgatatggctctttgccgaaatgctagagaaatgggtgtatttatgtacatttctaatagacatgaatttggaaggctattatccactgctaattacaatacttcccattataacaatgacctctggcagatttttgaaaatcctgtggactggaaggaaaagtatataaaccgtgattattcaaagattttcactgaaaatatagttgaacagccctgtccagatgtcttttggttccccatattttctgaaaaagcctgtgatgaattggtagaagaaatggaacattacggcaaatggtctgggggaaaacatcatgatagccgtatatctggtggttatgaaaatgtcccaactgatgatatccacatgaagcaagttgatctggagaatgtatggcttgattttatccgggagttcattgcaccagttacactgaaggtctttgcaggctattatacgaagggatttgcactactgaattttgtagtaaaatactcccctgaacgacagcgttctcttcgtcctcatcatgatgcttctacatttaccataaacattgcacttaataacgtgggagaagactttcagggaggtggttgcaaatttctaaggtacaattgctctattgagtcaccacgaaaaggctggagcttcatgcatcctgggagactcacacatttgcatgaaggacttcctgttaaaaatggaacaagatacattgcagtgtcatttatagatccctaagttatttacttttcattgaattgaaatttattttgggtgaatgactggcatgaacacgtctttgaagttgtggctgagaagatgagaggaatatttaaataacatcaacagaacaacttcactttgggccaaacatttgaaaaactttttataaaaaattgtttgatatttcttaatgtctgctctgagccttaaaacacagattgaagaagaaaagaaagaaaaaacttaaatatttatttctatgctttgttgcctctgagaataatgacaatttatgaatttgtgtttcaaattgataaaatatttaggtacaaataacaagactaataatattttcttatttaaaaaaagcatgggaagatttttatttatcaaaatatagaggaaatgtagacaaaatggatataaatgaaaattaccatgttgtaaaaccttgaaaatcagattctaactgattgtatgcaactaagtatttctgaacacctatgcaggtcttatttacagtgttactaagggaacacacaaagaattacacaacgttttcctcaagaaaatggtacaaaacacaaccgaggagcgtatacagttgaaaacatttttgttttgattggaaggcagattattttatattagtattaaaaatcaaaccctatgtttctttcagatgaatcttccaaagtggattatattaagcaggtattagatttagaaaacctttccatttcttaaagtattatcaagtgtcaagatcagcaagtgtccttaagtcaaataggtttttttttgttggtggttgtgcttgctttccttttttagaaagttctagaaaataggaaaacgaaaaatttcattgagatgagtagtgcatttaattattttttaaaaaactttttaagtacttgaattttatatcaggaaaacaaagttgttgagccttgcttcttccgttttgccctttgtctcgctccttattcttttttggggggagggttatttgcttttttatcttcctggcataatttccattttattcttctgagtgtctatgttaacttccctctatcccgcttataaaaaaattctccaacaaaaatacttgttgacttgatgttttatcacttctctaagtaaggttgaaatatccttattgtagctactgtttttaatgtaaaggttaaacttgaaaagaaattcttaatcacggtgccaaaattcattttctaacaccatgtgttagaaaattataaaaaataaaataattttaaaaaaaaaaaaaaaaaaaaaaa

SEQ ID NO: 610 - protein, 263 aa, Homo sapiens
MRPGAPGPLWPLPWGALAWAVGFVSSMGSGNPAPGGVCWLQQGQEATCSLVLQTDVTRAECCASGNIDTAWSNLTHPGNKINLLGFLGLVHCLPCKDSCDGVECGPGKACRMLGGRPRCECAPDCSGLPARLQVCGSDGATYRDECELRAARCRGHPDLSVMYRGRCRKSCEHVVCPRPQSCVVDQTGSAHCVVCRAAPCPVPSSPGQELCGNNNVTYISSCHMRQATCFLGRSIGVRHAGSCAGTPEEPPGGESAEEEENFV

SEQ ID NO: 611 - DNA, 2500 bp, Homo sapiens
gttcgccatgcgtcccggggcgccagggccactctggcctctgccctggggggccctggcttgggccgtgggcttcgtgagctccatgggctcggggaaccccgcgcccggtggtgtttgctggctccagcagggccaggaggccacctgcagcctggtgctccagactgatgtcacccgggccgagtgctgtgcctccggcaacattgacaccgcctggtccaacctcacccacccggggaacaagatcaacctcctcggcttcttgggccttgtccactgccttccctgcaaagattcgtgcgacggcgtggagtgcggcccgggcaaggcgtgccgcatgctggggggccgcccgcgctgcgagtgcgcgcccgactgctcggggctcccggcgcggctgcaggtctgcggctcagacggcgccacctaccgcgacgagtgcgagctgcgcgccgcgcgctgccgcggccacccggacctgagcgtcatgtaccggggccgctgccgcaagtcctgtgagcacgtggtgtgcccgcggccacagtcgtgcgtcgtggaccagacgggcagcgcccactgcgtggtgtgtcgagcggcgccctgccctgtgccctccagccccggccaggagctttgcggcaacaacaacgtcacctacatctcctcgtgccacatgcgccaggccacctgcttcctgggccgctccatcggcgtgcgccacgcgggcagctgcgcaggcacccctgaggagccgccaggtggtgagtctgcagaagaggaagagaacttcgtgtgagcctgcaggacaggcctgggcctggtgcccgaggccccccatcatcccctgttatttattgccacagcagagtctaatttatatgccacggacactccttagagcccggattcggaccacttggggatcccagaacctccctgacgatatcctggaaggactgaggaagggaggcctgggggccggctggtgggtgggatagacctgcgttccggacactgagcgcctgatttagggcccttctctaggatgccccagcccctaccctaagacctattgccggggaggattccacacttccgctcctttggggataaacctattaattattgctactatcaagagggctgggcattctctgctggtaattcctgaagaggcatgactgcttttctcagccccaagcctctagtctgggtgtgtacggagggtctagcctgggtgtgtacggagggtctagcctgggtgagtacggagggtctagcctgggtgagtacggagggtctagcctgggtgagtacggagagtctagcctgggtgtgtatggaggatctagcctgggtgagtatggagggtctagcctgggtgagtatggagggtctagcctgggtgtgtatggagggtctagcctgggtgagtatggagggtctagcctgggtgtgtatggagggtctagcctgggtgagtatggagggtctagcctgggtgtgtacggagggtctagtctgagtgcgtgtggggacctcagaacactgtgaccttagcccagcaagccaggcccttcatgaaggccaagaaggctgccaccattccctgccagcccaagaactccagcttccccactgcctctgtgtgcccctttgcgtcctgtgaaggccattgagaaatgcccagtgtgccccctgggaaagggcacggcctgtgctcctgacacgggctgtgcttggccacagaaccacccagcgtctcccctgctgctgtccacgtcagttcatgaggcaacgtcgcgtggtctcagacgtggagcagccagcggcagctcagagcagggcactgtgtccggcggagccaagtccactctgggggagctctggcggggaccacgggccactgctcacccactggccccgaggggggtgtagacgccaagactcacgcatgtgtgacatccggagtcctggagccgggtgtcccagtggcaccactaggtgcctgctgcctccacagtggggttcacacccagggctccttggtcccccacaacctgccccggccaggcctgcagacccagactccagccagacctgcctcacccaccaatgcagccggggctggcgacaccagccaggtgctggtcttgggccagttctcccacgacggctcaccctcccctccatctgcgttgatgctcagaatcgcctacctgtgcctgcgtgtaaaccacagcctcagaccagctatggggagaggacaacacggaggatatccagcttccccggtctggggtgaggagtgtggggagcttgggcatcctcctccagcctcctccagcccccaggcagtgccttacctgtggtgcccagaaaagtgcccctaggttggtgggtctacaggagcctcagccaggcagcccaccccaccctggggccctgcctcaccaaggaaataaagactcaaagaagccttttttttttttttttt

SEQ ID NO: 612 - DNA, 1708 bp, Homo sapiens
gcctgccaaataagacccagaaaaggaggaccgcaccgggacaggggagatgctggagcctgaaccctgggggatggggtctgaaggcagccgccgagattcagatgagattggcgcagttatgaacgtgatagcagcctagcatactctagaaagaaaagatgaaaagcgtcgggtggaagagatgcagcgttgagtggaagctgcgaacatgatgggatgagcggccctaggattatgtactcactgctgaacttcacagacagcgatccccaggtgtttcatttggtttatcagtgtttaatttgatgaatgccatcatgggaagtggcatccttggcttagcttatgttatggctaataccggtgtctttggatttagcttcttgctgctgacagttgctctcctggcttcttactcagtccatcttctgcttagtatgtgtattcagacagcctacttgggcccatgaactaactacttcatggttctgcctgcacattgactcacctgtcttccgttgattgaattccttcaatctttgtaaaattctctgtggagctgtaacatcttatgaagatcttggactctttgcatttggattacctggaaagttggtggtggcaggcaccataataattcagaatattggagctatgtcatcttatcttttaattattaaaacagagcttcctgctgctattgcagaatttttgactggagactatagtagatattggtatcttgatggacaaacactactaataatcatatgtgttggcattgtgttccctcttgcacttcttcccaaaataggctttcttggctacacaagtagtttatcatttttctttatgatgttctttgctcttgtggtaataattaaaaaatggtccatcccttgtcctctgacattaaattatgtagagaaaggcttccagatttcaaatgttacagatgattgtaagccaaagctctttcatttctccaaagagagtgcttatgccttaccaaccatggctttttcatttctctgccatacctcaatattgcccatatactgtgaacttcaaagtccttcaaagaaaagaatgcagaatgttaccaatacagcaattgctttaagttttctcatttattttatatctgcactctttgggtacctcactttttatgatgaacaactaaagcccagagaggtgaagtgacctgtcacagaattaaagacaaagtggagtcagaattactaaaaggttatagtaaatacttatcacatgatgttgttgtcatgactgtgaagttatgcatactatttgctgtgcttttgacagtccctctaatccacttccctgccagaaaagctgtaacaatgatgtttttctccaattttccattctcatggattcgccattttttgatcactctagcactcaatattatcatcgttttacttgcaatatatgttcctgacattagaaatgtatttggtgtagttggtgccagtacatcaacatgtttgatttttatattcccaggactattttatcttaaacttagcagagaggattttctgtcatggaaaaagcttggggcattcgttttgctcatctttggaattttggttgggaattttagtttagcactcatcatttttgattggattaataaataaaagaaatattttcctaaaaaaaaaaaaaaaaaaaa

SEQ ID NO: 613 - protein, 357 aa, Homo sapiens [sequence omitted]

SEQ ID NO: 614 - DNA, 1766 bp, Homo sapiens
tgtacccctgaatcataagccataaggtcctttcctgggttgttggcctgtaaaattggctttgcagaaccacagtgctatcaataaatacggccaagctgatctagtgcttggtagtttggggcacctggctctttcctcttgaaggttgaatataatgctagtgctcttttacaggtggccagtggcgatttcgatgcttgcgtccaagtctgtgaatgtaaaacccctcgtcacccataggtttcctctggagaaagctctggaggcctttgaaacatttaaaaagggattggggttgaaaatcatgctcaagtgtgaccccagtgaccagaatccctgatgttaatgggctctgctcatccccacagtctcgggatctcagggcacaatggctggacaggggtgggctctgatgcagaactttctcttttgaatgttaagaataactaatacaattcattgtgaacagaagtccttaagcagaggaattggtgtgccttaaagatacaatctgggatagtttgggggaacttgtagccagaatgccctgttcatgctgagcaaagttcagcaagtagagcagagtttggcaggcaggtgccaggaactccccttcttcctggagtgccttcattgaggaaggaaatctggcccttgggtttcctggttccactgctactgacccagaggggaatgagggctgagttatgaaaagataacttcatgaagacttaactggcccagaagctgattttcatgaaaatctgccactcagggtctgggatgaaggcttgtcagcacttccagtttagaacgcaatgtttctagagacatattggctgtttgttttgatgataaaaggagaataagaaaaggcatcactttcctggatccaggataatttttaaaccaatcaaatgaaaaaaacaaacaaacaaaaaaggaaatgtcatgtgaggttaaaccagtttgcattcccctaatgtggaaaaagtaagaggactactcagcactgtttgaagattgcctcttctacagcttctgagaattgtgttatttcacttgccaagtgaaggaccccctccccaacatgccccagcccacccctaagcatggtcccttgtcaccaggcaaccaggaaactgctacttgtggacctcaccagagaccaggagggtttggttagctcacaggacttcccccaccccagaagattagcatcccatactagactcatactcaactcaactaggctcatactcaattgatggttattagacaattccatttctttctggttattataaacagaaaatctttcctcttctcattaccagtaaaggctcttggtatctttctgttggaatgatttctatgaacttgtcttattttaatggtgggttttttttctggtaagatttagacctaaatcgcatcatgccaacttgtgactttgagactattcatcaagaatgaggatatagtagccatgacatagcttgagctatagcctttaattccttactttggctatgggtggagggtgagtttgaagaggttctgattttcttgtaacctgggaaagccatgaccttgtgcccgattctttcagattgctttgggtaataaatattggtggtggtatctgactcatgctgctgtttatggtcctgtttagtggggaatggactcaggttacccatttcccagagggaaggatcccaggatttttgaaggttacatattttctgtaccaaatataa

SEQ ID NO: 615 - protein, 430 aa, Homo sapiens
MPAGRARTCALLALCLLGPQDFGPTRFICTSVPVDADMCAASVAAGGAEELRSSNVLQLRETVLQQKETILSQKETIRELTAKLGRCESQSTLDPGAGEARAGGGRKQPGSGKNTMGDLSRTPAAETLSQLGQTLQSLKTRLENLEQYSRLNSSSQTNSLKDLLQSKIDELERQVLSRVNTLEEGKGGPKNDTEERVKIETALTSLHQRISELEKGQKDNRPGDKFQLTFPLRTNYMYAKVKKSLPEMYAFTVCMWLKSSATPGVGTPFSYAVPGQANELVLIEWGNNPMEILINDKVAKLPFVINDGKWHHICVTWTTRDGVWEAYQDGTQGGSGENLAPYHPIKPQGVLVLGQEQDTLGGGFDATQAFVGELAHFNIWDRKLTPGEVYNLATCSTKALSGNVIAWAESHIEIYGGATKWTFEACRQIN

SEQ ID NO: 616 - DNA, 5071 bp, Homo sapiens
ggcctgatagcgcggcgtgtggaccggccgaagagcgcgcccagagcggcgccgtcgcgagccacagcccgagccggtcccagccgagccgagccccagccgagccgagccggcccgagcgctccggtgcccgcagccatgccggccggccgcgcgcgcacctgtgcgctgctcgccctctgcctcctggggccccaggatttcgggccgacgcgcttcatctgcacttcggtgccggtggacgccgacatgtgtgccgcgtccgtggccgcgggcggcgcggaggagctccggagcagcaatgtgctgcagctccgggagaccgtgctgcagcagaaggagaccatcctgagccagaaggagaccatccgcgagctgaccgccaagctgggccgctgcgagagccagagcacgctggaccccggagccggcgaggcccgggcgggcggcggccgcaagcagccgggctcgggcaagaacaccatgggcgacctgtcccggacaccggccgccgagacgctcagccaactcgggcaaactttgcaatcgctcaaaacccgcctggagaacctcgagcagtacagccgcctcaattcctccagccagaccaacagcctcaaggatctgctgcagagcaagatcgatgagctggagaggcaggtgctgtcccgggtgaacaccctggaggagggcaagggggggcccaagaacgacaccgaggagagggtcaagatcgagaccgccctgacctccctgcaccagcggatcagcgagctcgagaaaggtcagaaagacaaccgccctggagacaagttccagctcacattcccactgcggaccaactatatgtatgccaaggtgaagaagagcctgccagagatgtacgccttcactgtctgcatgtggctcaagtccagcgccacgccaggtgtgggcacgcccttctcctacgctgtgcccggccaggccaacgagctggtcctcattgagtggggcaacaaccccatggagatcctcatcaatgacaaggtggccaagctgccttttgtcatcaatgatggcaagtggcaccacatctgtgtcacctggaccacccgggacggggtctgggaggcctaccaggatggcacgcagggtggcagtggcgagaacttggcgccctatcaccccatcaagccccagggcgtgctggtgctgggccaggagcaggacactctgggtggtgggtttgatgccacccaggcatttgtgggtgagctggcccacttcaacatctgggaccgcaagctgacccccggggaggtgtacaacctggccacctgcagcaccaaggctctgtccggcaatgtcatcgcctgggctgaatcccacatcgagatctacggcggggccaccaagtggaccttcgaggcctgtcgccagatcaactgagcacggcaggccaggctgagccgcccgccctcgccccctgcttgtgcggcgatgatctgtttgtgcgtctcttctctcccttttccccaggaatgaaccgaggccgtcgccctgcacacgcacacgcacacagcctggttttgtcctcatgcacacgaagcagcccctgctcccatctgtccctgaggaagccccacttctctgtaggagcccggactctctcagcatgccccattcacagctgaagtgggtgctgcaacgtcttgaacaaggcagaagttggtgagaggatctgtgtgtgcgtgtctacatgtgtgtgtctacgtgtgtgcgtgcgtggctgggggaggccttttctttgaggacgtacctcatttccttctttcttctggctttggaaaaatctcatgatgaaaattcatatttgccaactttgttagctgcgtgcgtgctttggggttggtgcaacctcagtacacgcatttgtctttgtttgcaaacctttctcagagcgacatatctttatattgatgtaataaatgtcttttagtggtttgtcaaaggccgggggcgggggctctctacagagaatttttattttgtaatagaagtgaactgtctctgaaggtgaaggcaggccgtcctgggatggtaccctgtgctctcccgtggaggagaggggatggctgaggacactggcccttacccagggcgaacagcatccatccctgctgtttgcatcttgagagcagcatggggcctgggaggtcggcctgtgtgcccagctcagctagctctgccccaggacggccctgccctcgaccttcccacctcctcagatcctgcaaggctgggtctgcccctcccttctcacctctggagctgtgctgcactgcttcccagagagggccctgagagaggagcgtgccacccaccagggaagccgggccccagcacccctctcctttggcctcccggagtgcagaccagaggggaccttttaaggaaagaagccgtgtttcgatgaagacctggccacatggggcactgggacttcaacccagcccatcggtgggaaggtcctttttgggggactttgacagccatatccctcccagcacaccaggcgccaggtgagctggttcagacccctccagggtactccagagacctcacgtgtggagccaggcctggccaggcaggggcctgaaacccactcctccatctcatgggctcacggcctacacgagcccacaagctgccactggccggcgacactgacacctgagcagtgtccagaacctttttgcctttttttgttccccgtgaaaagcaacatggacatttccttctagtccttccaaggaggggagagaagtgtatgtgcatttgtgtgtgtgtgtgtgtgttgtgtgtgtgtgtgcgctaagtgagaaagagagcaggctcgggaggccctgcccagggtaggaggagcttcctgctttgcaccatctggtggtcgcaccctggagggcaccccgactctgtctccaggagtctcatcagcaaaccgctgacaagtctttctagaaattctactgcactgcctggctcagctgcacgctgcagacatttctgcaggaggagcaggtgtttctgtcttctgttccttctagggccacctgtccccttaaacacaggtccacgttgtgtcaagaacctagtgcatctgtgtgtgtctgtcagtgtctctgtgtcagtgttctcgtgggtgtctgcacggtaccggcccgccttctgcaatcatcactcccgcagagggggtgcagatcaggcgccgtgctgcggttgttgttcaacagtgctttttcttagatagcgtcttcctcagcgcccgtcggttgtggcatccttgatctcagggatcttctccgtttgcatgtcctcggagtggcgtgttccttctccctgggtccgacatgtgttcccgcacctgcatggactgccccggttctgtgttgtgtgccgagtgccgcccagtgttctgtgaccacccgtgtagctactgaaaatggctgggtaagcaagtcaagggtgttggaggaggtcaagagagagctcagtttccctctccccctccccaaacacaccaagaagcatttttaacgtgtaggttgagaacaagcctaaaggattcccacagctgggagccagcaagagagcttggagtcgcctctctagaccagatctagccccaccctcactccagccatctcggagcccttgtgtaggcaacgccggtgcgcggctgtgtggggtgctccctgccagcacctccggccagccccgcccctgccgatctactggaccgcagaccaccttctgcccccgtggccaggtgggagctgtccgttcaggaccatgagccatcctctgccctgactagcgaggggcagagcacaccccagtgcttacgcctccacccctgcagcctcctggcccgctcaccttcctcacccctcctctgacccacccatggtgccagggccgaagctgacctttagctccctcctgcccttgctagggtctgagccaagcccctcgactcctcactgtgttgacacttggcactttgctggccccgagaaggtcgatgacacagccgcaaatctaatccacgtagttcccatttactccttaatctgattgatgttccctcttgcactgaataatacatgcctctctcaggtaagccattttataaaacaagaagataaaaagcactgttgaggcagtgtttgcttttgccgagctggtgtccgacagctccctgggtgtccggggtgggagagctgttgacagaagctctccgggcctcagggcttagatcccacttgagtcgtaagccttcttgcttttgataacacagtattatttctcttactgtagaagaaaaagtttattaccaaacaagagtatttttatgaaagaaaaggacaaacctataaattaactcaacctatatctcccttgaaaatactttcaggctccaccaaaacgtagaactgaaagcatgtattttggaagaaagagatacattttgtatgctttcttttccttttgtagattcccagtttattttctaagactgcaaagatcactttgtcaccagccctgggacctgagaccaagggggtgtcttgtgggcagtgagggggtgaggagaggctggcatgaggttcagtcattccagtgagctccaaagaggggccacctgttctcaaaagcatgttggggaccaggaggtaaaactggccatttatggtgaacctgtgtcttggagctgacttactaagtggaatgagccgaggatttgaatatcagttctaaccttgatagaagaaccttgggttacatgtggttcacattaagaggatagaatcctttggaatcttatggcaaccaaatgtggcttgacgaagtcgtggtttcatctcttaaacacagtgtgtaaatttattcaactaacgatgggaaatgtattacttctgtacacagtggactgaagtgcaatttgttgaaagggaacaagtcattgaagagaaaaaaaaaaagcccaatacttagagtcccaattttgtctcatttgccaaaaaaa

SEQ ID NO: 617 - protein, 494 aa, Homo sapiens
MGQPREFWHLRSQVPVPTCHLLTVQPWCLLPHPTPAGGRERRHSASSLLAALCLRKAVLRPHPAVLPGVGGCVVLSSGRMKAPLRGGLALGTGPAPTKLQLLHDWQSEPGPSGWQQGPSPPLFPAGTSLVQHLMTVLIRKHSQLFTAPVPEGPTSPRGGLQCAVGWGSEEVTRDSQGEPGGPGLPAHRTSSLDGAAVAVLSRTAPTGPGSRCSPGKKVQTLPSWKSSFRQPRSLSGSPKGGGSSLEVPIISSGGNWLMNGLSSLRGHRRASSGDRLKDSGSVQRLSTYDNVPAPGLVPGIPSVASMAWSGASSSESSVGGSLSSCTACRASDSSARSSLHTDWALEPSPLPSSSEDPKSLDLDHSMDEAGAGASNSEPSEPDSPTREHARRSEALQGLVTELRAELCRQRTEYERSVKRIEEGSADLRKRMSRLEEELDQEKKKYIMLEIKLRNSERAREDAERRNQLLQREMEEFFSTLGSLTVGAKGARAPK

SEQ ID NO: 618 - DNA, 1871 bp, Homo sapiens
atggggcagccgagagagttctggcatctcaggtcccaggttccagttccaacctgccacctgctcaccgtgcagccttggtgcctgcttcctcaccccaccccagctggagggcgtgagcgcaggcacagtgcttcctccctgcttgcggctctgtgcctgaggaaggcggttctgcggccccatcctgctgtcctgcctggagttggagggtgtgtggtcctttcctctgggcggatgaaggctcccttgaggggcggcctggctctggggacagggccagctcccacgaagctgcagcttctccatgactggcagagcgagcctgggccgagtggctggcagcaaggcccttctccgcctctcttcccggcaggcacttccctcgtccagcacctgatgaccgtcctcatccgcaaacacagccagctcttcacggcaccggtcccggaagggcccacctccccgcgcgggggcctgcaatgcgcagtggggtggggctccgaggaggtcaccagggacagccaaggagagcccggcggccccggcctgcccgcgcacaggacctcttccctggacggggcggccgtggcggtgctctccagaacagcccccacggggccggggagccggtgcagccctgggaagaaggtgcagaccctgcccagttggaagtcctccttccggcagccgaggtccctatcgggaagcccgaaggggggcggctcatccctggaggtgcccatcatctcctccggcgggaactggcttatgaacgggctgtcctccctgcgcggacaccgccgggcctcgtcgggagaccggctcaaggactcgggctccgtgcagagactctccacctacgacaatgtgcccgcgccgggcctggtccccggcatacccagcgtggccagtatggcgtggtccggggcctcgtccagcgagtcgtcggtggggggctcactcagcagctgcacggcctgccgcgccagcgactcgtctgcccgcagttccctgcacaccgactgggccctggagccctccccgctccccagcagcagcgaggaccccaagtccctggacctggaccacagcatggacgaggcgggcgcgggtgccagcaacagcgagcccagcgagccggacagccccacccgggaacacgcgcgccgctccgaggccttacaggggctggtcactgagctcagggccgagctgtgccgccagcggactgagtacgagaggagtgtgaaaagaatcgaagaagggagtgctgacctgagaaaacgaatgtcccggttagaagaagaactggaccaggaaaagaaaaaatacatcatgctggaaataaagctgcggaactctgaacgggcgcgggaggatgcggagaggaggaaccagctgttgcagagggaaatggaggagtttttttcgaccctaggaagcttgactgttggggcaaaaggtgccagggccccaaagtaaaaggaatggcagagctcacttctgtaccacgtctgctggtctccagccttgtatggagttagaagcgtctgtatctctggagcagccaggcgctctggagccagctggagagagagagatcctgatacctctgtggggactgtggggacttttgggaccccacacactccaggtgggatcagatgctgctccaaccatgcagttcctggtgagggtcagaaggggacggtaccaagagcagcgcttagcccttacccaggaaatatccttcatggccacagaaatggagggcgcccaggatccaggcagccaccgggaacagtcagctttctttattaaatgtgctcacaaagcaaaaaaaaaaaaaaaaaaaaaaaaaaaaaaaa

SEQ ID NO: 619 - protein, 505 aa, Homo sapiens
MNINDLKLTLSKAGQEHLLRFWNELEEAQQVELYAELQAMNFEELNFFFQKAIEGFNQSSYQKNVDARMEPVPREVLGSATRDQDQLQAWESEGLFQISQNKVAVLLLAGGQGTRLGVAYPKGMYDVGLPSRKTLFQIQAERILKLQQVAEKYYGNKCIIPWYIMTSGRTMESTKEFFTKHKYFGLKKENVIFFQQGMLPAMSFDGKIILEEKNKVSMAPDGNGGLYRALAAQNIVEDMEQRGIWSIHVYCVDNILVKVADPRFIGFCIQKGADCGAKVVEKTNPTEPVGVVCRVDGVYQVVEYSEISLATAQKRSSDGRLLFNAGNIANHFFTVPFLRDVVNVYEPQLQHHVAQKKIPYVDTQGQLIKPDKPNGIKMEKFVFDIFQFAKKFVVYEVLREDEFSPLKNADSQNGKDNPTTARHALMSLHHCWVLNAGGHFIDENGSRLPAIPRLKDANDVPIQCEISPLISYAGEGLESYVADKEFHAPLIIDENGVHELVKNGI

SEQ ID NO: 620 - DNA, 2332 bp, Homo sapiens
ggcacgaggctgtgctcccggcgctgacgtgtctgggcggtcggcttccactccttcaggcgtcggcagccactagtcgtggcgagaggggcggggtggccggggctggcgctccacttggcccccgctcccggcccgccccgccgccgcggccccccggatgagggtatatattcggagcgagcgcgggacgccgatgagtggccgcgcggaaggagctggagacggtcgtagctgcggtcgcgccgagaaaggtttacaggtacatacattacacccctatttctacaaagcttggctattagagcattatgaacattaatgacctcaaactcacgttgtccaaagctgggcaagagcacctactacgtttctggaatgagcttgaagaagcccaacaggtagaactttatgcagagctccaggccatgaactttgaggagctgaacttctttttccaaaaggccattgaaggttttaaccagtcttcttaccaaaagaatgtggatgcacgaatggaacctgtgcctcgagaggtattaggcagtgctacaagggatcaagatcagctccaggcctgggaaagtgaaggacttttccagatttctcagaataaagtagcagttcttcttctagctggtgggcaggggacaagactcggcgttgcatatcctaaggggatgtatgatgttggtttgccatcccgtaagacactttttcagattcaagcagagcgtatcctgaagctacagcaggttgctgaaaaatattatggcaacaaatgcattattccatggtatataatgaccagtggcagaacaatggaatctacaaaggagttcttcaccaagcacaagtactttggtttaaaaaaagagaatgtaatcttttttcagcaaggaatgctccccgccatgagttttgatgggaaaattattttggaagagaagaacaaagtttctatggctccagatgggaatggtggtctttatcgggcacttgcagcccagaatattgtggaggatatggagcaaagaggcatttggagcattcatgtctattgtgttgacaacatattagtaaaagtggcagacccacggttcattggattttgcattcagaaaggagcagactgtggagcaaaggtggtagagaaaacgaaccctacagaaccagttggagtggtttgccgagtggatggagtttaccaggtggtagaatatagtgagatttccctggcaacagctcaaaaacgaagctcagacggacgactgctgttcaatgcggggaacattgccaaccatttcttcactgtaccatttctgagagatgttgtcaatgtttatgaacctcagttgcagcaccatgtggctcaaaagaagattccttatgtggatacccaaggacagttaattaagccagacaaacccaatggaataaagatggaaaaatttgtctttgacatcttccagtttgcaaagaagtttgtggtatatgaagtattgcgagaagatgagttttccccactaaagaatgctgatagtcagaatgggaaagacaaccctactactgcaaggcatgctttgatgtcccttcatcattgctgggtcctcaatgcagggggccatttcatagatgaaaatggctctcgccttccagcaattccccgcttgaaggatgccaatgatgtaccaatccaatgtgaaatctctcctcttatctcctatgctggagaaggattagaaagttatgtggcagataaagaattccatgcacctctaatcatcgatgagaatggagttcatgagctggtgaaaaatggtatttgaaccagataccaagttttgtttgccacgataggaatagcttttatttttgatagaccaactgtgaacctacaagacgtcttggacaactgaagtttaaatatccacagggttttattttgcttgttgaactcttagagctattgcaaacttcccaagatccagatgactgaatttcagatagcatttttatgattcccaactcattgaaggtcttatttatataattttttccaagccaaggagaccattggccatccaggaaatttcgtacagctgaaatataggcaggatgttcaacatcagtttacttgcagctggaagcatttgtttttgaagttgtacatagtaataatatgtcattgtacatgttgaaaggtttctatggtactaaaagtttgttttattttatcaaacattaagcttttttaagaaaataattgggcagtgaaataaatgtatcttcttgtctctggaaaaaaaaaaaaaaaaaaaaaaaaaaaaaa

SEQ ID NO: 621 - protein, 452 aa, Homo sapiens
MQRQAPYNIRRSSTSGDTEEEEEEEVVPFSSDEQKRRSEAASGVLRRTAPREHSYVLSAAKKSTGSPTQETQAPFIAKRVEVVEEDGPSEKSQDPPALARSTPGSNSSRGEEIVRLQILTPRAGLRLVAPDVEGMSSSATSVSAVPADRKSNSTAAQEDAKADPKGALADCEGKDVPTRVGEAWQERPGAPRGGQGDPAVPAQQPADPSTPERQSSPSGSEQLVRRESCGSSVLTDFEGKDVATKVGEAWQDRPRAPRGGQGDPAVPTQQPADPSTPEQQNSPSGSEQFVRRESCTSRVRSPSSCMVTVTVTATSEQPHIYIPAPASELDSSSTTKGILFVKEYVNASEVSSGKPVSARYSNVSSIEDSFAMEKKPPCGSTPYSERTTGGICTYCNREIRDCPKITLEHLGICCHEYCFKCGICSKPMGDLLDQIFIHRDTIHCGKCYEKLF

SEQ ID NO: 622 - DNA, 3614 bp, Homo sapiens
gctacaagatgaccactgaggattacaagaagctgtgagtatgcaacgccaggcaccctacaatatcaggcgcagctctacatcaggggacaccgaggaggaggaggaggaggaggtggtgccattctcctcagatgaacagaaacggaggtcagaggctgcaagcggtgttctgaggaggacagctccccgggagcactcctacgtcctgtcagcggccaagaagagcactggcagtcctacccaggagacacaggcaccgtttatcgcgaagagggtggaggtggtggaagaggacgggccttctgagaagagccaggacccacctgctctggcaagatccactcctggctcaaacagctcaagaggtgaggaaattgtccgcctgcagatcctgacacccagggcaggactccgcctggtggccccagacgtggaaggcatgagctccagtgccacttcagtctctgctgtccctgctgataggaagagcaacagcacagcagcccaggaggatgcaaaggcagacccaaagggggccttggctgattgtgaggggaaggatgtacccaccagggtcggagaggcctggcaggagaggcctggagctccaagaggtggccaaggagacccagctgtacccgctcagcaacctgcagatcccagcaccccagagcggcagagcagccccagcggatctgagcaacttgtcagacgagagagttgtggcagtagcgtgttgactgattttgaggggaaggatgtggccaccaaggtcggagaggcctggcaggacaggcctagagccccaagaggtggccaaggagacccagctgtacccactcagcaacctgcagatcccagtaccccagaacagcagaacagccccagcggatctgagcaattcgtcagacgagagagctgcaccagcagggtgaggagcccctcgagctgcatggtcactgttactgtcactgccacatctgagcagcctcacatttatattccagcccccgcaagtgaattggactccagctctaccaccaaagggattctcttcgtgaaggagtacgtgaatgctagtgaagtgtcttctgggaagccagtatctgcacgctatagcaacgtcagcagcattgaggactcattcgccatggagaagaagcctccatgtggcagcactccatactctgagaggacaactggagggatctgtacttactgcaaccgtgagatccgagactgtccaaagattaccctagaacatcttggtatctgctgccatgaatattgctttaagtgtgggatttgcagtaaaccgatgggcgatctcctggatcagatcttcattcaccgtgacaccattcactgtgggaaatgctatgagaagctcttctagcgaccccccaccgccaggctgatcagaagctgatgactcgtggacaaatttggctgtccccagttttgccccaagttgctgtctccccttccctcacctcctccctccctgtttgatttcttcatgcttttgcccttctcaagttgaagttgcatacatccaatatcgtatcttaatgatgctatgataattgcttgtgtgtgtagcttcttgtagcttagaaagcgctttatgcccatgatgtcatttcaggctcaaccaaagaggatcaaacaggaattccatcttggcttccctaagacagattggctttctaatgagtttaagtgggcagaagtgtagggttcagtgtgtcctgactcccttgaggcttataatgggccaagttgaagactgttgatgatccctggtgggtaaattgcagacatcaaatgctagggattggcataggctagtgtttagcttgtctatttgccatatctatttttttaaatttccatacacttgtaaaagtagttagttgcttttgattgagttatatagcagtttttcatttggtcttccactcaccgttcactatatttgagtgttcccttacaggtatgttggcatgtgttggaaaatttacacaattaggtttaaattcagtaggatgtgattttgggggtggactgatcaaagtgatatctgtgtctgttggaatcttgatagctgattaatttgccctcaattctgctccctgaacttcacacataaatcttcccaagtgggttttagggtgtatagatcccagcaggattaaggaagtggaaaagcagctaacatttcttgaggctctaccacatagcaggcactgtcacagagtaatggcattaatccccataataatcctgtgaaggtgatattctcatcccatcttagacatgaggatattggaactcagagaggtggctattgcattgcgcagaacgctacagagcccatgctcttcccagagcagcacccacaaaagcaagcattgattttgtgctcagtgtgtgccaagcactgtgcagagggtacacagttcctgccaggttaacaccctcccttcaggcctcccaaaggcataggcttgcaaagagcagaaggtgtgaaatcacactcttcctctgggcatcctggatccctgaattatccccccccccatgaagtacttcaagggccaagctgcccctttccctcctctccgcccatgaaaatgcctccaaactgagatgctttcagctgagaacagatttgactcacagacattaccaaagaggagcttgtgaatccaggaaaagctccagggggctagctgatctgagcagagagctttcagtgacccattttcctgtctagactctgccttaagctagtggcaactgctggggccccaggtacttgggacatggaaactcgttggatggctgggcagatgtaagcctgtccatgcagtcagccgatcctctgctcaggttcagctggactctgccatctgtgggcccagcatcactctgtaagttccttgaaaggaagaacaaccttagagtatttctgatacaaaatgagggcctctgctcttgatttaattataaaatgtctacgtctttctccagtttctgagccctatgcacattggcttgtgggcttgttcttcctgccaaatgatcagagagggaacattccatttatttgtagtggatttcctctggagggcatgtacccacactaaataccaactgctcttcctcagctgtagtccccaacatcagacttggcacgtggtggacactaacacacaggcactcaatgaatgagtgaaggaaataaaagtcaccccccgttggtgagaaggtgcctatccccctgagtcctcagtgcaggaccagtggatgaaaggcaaggtaaagaggcccaagataggctggcttcccccgttcaaggtatagtctgcctttaagggagttttagaaccaacatgcaagacattgaaagaaatcttgcaagagccattattgacttagatccaaaacagcctctctcatgtctaaaaaggcacagaattttgcagatctgaggaagagggatgcattacctttttgcttcttttcaattgcttagtgtttctaatcatacttaatccacactaatgtgcgcaattataataaatgctaaaatatcaaaaaaaaaa

SEQ ID NO: 623 - protein, 279 aa, Homo sapiens
MTERFDCHHCNESLFGKKYILREESPYCVVCFETLFANTCEECGKPIGCDCKDLSYKDRHWHEACFHCSQCRNSLVDKPFAAKEDQLLCTDCYSNEYSSKCQECKKTIMPGTRKMEYKGSSWHETCFICHRCQQPIGTKSFIPKDNQNFCVPCYEKQHAMQCVQCKKPITTGGVTYREQPWHKECFVCTACRKQLSGQRFTARDDFAYCLNCFCDLYAKKCAGCTNPISGLGGTKYISFEERQWHNDCFNCKKCSLSLVGRGFLTERDDILCPDCGKDI

SEQ ID NO: 624 - DNA, 1892 bp, Homo sapiens
agggtacgggccgggaccgccgcagcccggggcgggggcacggcaaccgcgaggcctgggggcgcccgccccccgcgccccacgcccggtgccagcgagccgaggcgtgcatctccttatatggtcaaatgacacggcggggtttctcgagggcgggagctgcgcagcgctccactcggccggcagcggagccgcagccaccagccgcccgcgccctccagccccgtccgggagtccccggcccgctgcggtgccgtgagtacctccaaccccctgcgccccggagggaggccgaggggcttagccaccagggctcggaagtgggggccgaatccggtgcgagacccaaggagaggggagcagagccggagttggggagactgtggctgaaaactgtgtcttcctggagactaggctggcattttgactttgggacggagtctcgctttgtcgcccaggctggagtgcagtggcacgatctcagctcactgcaagctctacctcttggttcacgccattctcctgccccagcctcccaagtagctgggactacaggttgctgaaaagccaggagtcaaaatgactgagcgctttgactgccaccattgcaacgaatctctctttggcaagaagtacatcctgcgggaggagagcccctactgcgtggtgtgctttgagaccctgttcgccaacacctgcgaggagtgtgggaagcccatcggctgtgactgcaaggacttgtcttacaaggaccggcactggcatgaagcctgtttccactgctcgcagtgcagaaactcactggtggacaagccctttgctgccaaggaggaccagctgctctgtacagactgctattccaacgagtactcatccaagtgccaggaatgcaagaagaccatcatgccaggtacccgcaagatggagtacaagggcagcagctggcatgagacctgcttcatctgccaccgctgccagcagccaattggaaccaagagtttcatccccaaagacaatcagaatttctgtgtgccctgctatgagaaacaacatgccatgcagtgcgttcagtgcaaaaagcccatcaccacgggaggggtcacttaccgggagcagccctggcacaaggagtgcttcgtgtgcaccgcctgcaggaagcagctgtctgggcagcgcttcacagctcgcgatgactttgcctactgcctgaactgcttctgtgacttgtatgccaagaagtgtgctgggtgcaccaaccccatcagcggacttggtggcacaaaatacatctcctttgaggaacggcagtggcataacgactgctttaactgtaagaagtgctccctctcactggtggggcgtggcttcctcacagagagggacgacatcctgtgccccgactgtgggaaagacatctgaattcaacacagagaagttgctgcttgtgatctcacacacagatttttatgttttctttctcacccaggcaatcttgccttctggtttcttccagccacattgagactttcttctagtgcttttcagtgatactcacgtttgcttaaaccctttagtgctttgtgatagttcagtcccagggaaagagaaaactcgccctaggccctaggtgggaagatggtttgaaatttttgtaatcgagtaaggcacacccaaatgtaaaaatccttttgaatgatgcctttataaatctttctctcactgtctatttaagtgcaattaacatatgtcacgaacttgaaagttttctaaactcaataaggtaatgaccagttgttatttacagctctgtaacctcccgttgcgtcaagtctaaaccaagattatgtgacttgcaataaagttattcagaacagaaaaaaaaaaaaaaaaaa

SEQ ID NO: 625 - protein, 382 aa, Homo sapiens
MDGETAEEQGGPVPPPVAPGGPGLGGAPGGRREPKKYAVTDDYQLSKQVLGLGVNGKVLECFHRRTGQKCALKLLYDSPKARQEVDHHWQASGGPHIVCILDVYENMHHGKRCLLIIMECMEGGELFSRIQERGDQAFTEREAAEIMRDIGTAIQFLHSHNIAHRDVKPENLLYTSKEKDAVLKLTDFGFAKETTQNALQTPCYTPYYVAPEVLGPEKYDKSCDMWSLGVIMYILLCGFPPFYSNTGQAISPGMKRRIRLGQYGFPNPEWSEVSEDAKQLIRLLLKTDPTERLTITQFMNHPWINQSMVVPQTPLHTARVLQEDKDHWDEVKEEMTSALATMRVDYDQVKIKDLKTSNNRLLNKRRKKQAGSSSASQGCNNQ

SEQ ID NO: 626 - DNA, 2509 bp, Homo sapiens
ggcacgaggctgcggccgccagctcccgcgaccgcctctcctgcccctcgccggtacctcagcaaggtgccactagaagcgccaggctggggccgcctctgagcgccccgcgggggccatggatggtgaaacagcagaggagcaggggggccctgtgcccccgccagttgcacccggcggacccggcttgggcggtgctccgggggggcggcgggagcccaagaagtacgcagtgaccgacgactaccagttgtccaagcaggtgctgggcctgggtgtgaacggcaaagtgctggagtgcttccatcggcgcactggacagaagtgtgccctgaagctcctgtatgacagccccaaggcccggcaggaggtagaccatcactggcaggcttctggcggcccccatattgtctgcatcctggatgtgtatgagaacatgcaccatggcaagcgctgtctcctcatcatcatggaatgcatggaaggtggtgagttgttcagcaggattcaggagcgtggcgaccaggctttcactgagagagaagctgcagagataatgcgggatattggcactgccatccagtttctgcacagccataacattgcccaccgagatgtcaagcctgaaaacctactctacacatctaaggagaaagacgcagtgcttaagctcaccgattttggctttgctaaggagaccacccaaaatgccctgcagacaccctgctatactccctattatgtggcccctgaggtcctgggtccagagaagtatgacaagtcatgtgacatgtggtccctgggtgtcatcatgtacatcctcctttgtggcttcccacccttctactccaacacgggccaggccatctccccggggatgaagaggaggattcgcctgggccagtacggcttccccaatcctgagtggtcagaagtctctgaggatgccaagcagctgatccgcctcctgttgaagacagaccccacagagaggctgaccatcactcagttcatgaaccacccctggatcaaccaatcgatggtagtgccacagaccccactccacacggcccgagtgctgcaggaggacaaagaccactgggacgaagtcaaggaggagatgaccagtgccttggccactatgcgggtagactacgaccaggtgaagatcaaggacctgaagacctctaacaaccggctcctcaacaagaggagaaaaaagcaggcaggcagctcctctgcctcacagggctgcaacaaccagtagctcatggggccttggaggagcctggcctctcagcctgcataacagactgaaatgtgctcaggccctggccaggagggcccagggtcattcttttaacaaaaggattattttgttgtgttttaatttgtcactcggaacttcaggatggaggaccctgaccctaagcctccttcagatctctggcccaggctcaagccctagagatgggcagggcctaggggctgggagctgcctgctgccatagcagcacctttagctaggttggcccgagtgaggcctctgtgctgtcctgccctggtgcatggccttagctttctaggccactgggagttgtggctgggcttcccatcttccacagagacatctccctgtgggatgggcagatgggcctggccttgagaaaggcattggccattggttgccatggtgaccagggaccacgttgctgcctgtgaatgctgagtgagcgagtaagggaggaggggcgattgagggttcacctctgccttggggaggctgatttctcacacactggctggccctctcattctcactcctccttgggccctgaggctgctggatccggtctgcctgcctccctgtgcagtccagccctgccttgctgcagccccagcccagatggcactcagcgctctcccctgagggagtccctgggcctagccatcccctcactattcccgacccaaagggtgacttttcatctgaacttaaggtgggagatatttttaacttttttccactttggaaaatgtcactgtgacaaaagccagcatactttccctgcacccatctgctcaccagatctcaggcaggaaagcccctctctgttgaagtcaggggctatcttttggtatacttgtgtgaaagtggctggttgggagcagagctaagtggcttcccattaacctgaggtctctttctttactctgggtcagacctgaggttggggaaggcgactgagccatgctcagaatgtctggtcctggcttgggcctgagtagggcagagagggcctttcatggctgatcagagcttaccagccccaccccaccatggtagccttagggtgctgagtgcctgatactgcctgacaagtgcctgacacgcagcctagttccttcctggcccctctctcactggctgggaaaccctagaccatgtcagataggacaacactgctgggttttacatccagatagtaataaacaccatttcatcatt

SEQ ID NO: 627 - DNA, 496 bp, Homo sapiens
  misc_feature (152)..(152): n = a, c, g, or t
  misc_feature (158)..(158): n = a, c, g, or t
  misc_feature (394)..(394): n = a, c, g, or t
  misc_feature (408)..(408): n = a, c, g, or t
  misc_feature (418)..(418): n = a, c, g, or t
  misc_feature (442)..(442): n = a, c, g, or t
  misc_feature (471)..(471): n = a, c, g, or t
  misc_feature (481)..(481): n = a, c, g, or t
  misc_feature (492)..(492): n = a, c, g, or t
actggtgtgagctccagcatcccctttgctcgaaatggaccccaactgctcttgcgccactggtggtcctgcacgtgcgccggctcctgcaagtgcaaagagtgcaaatgcacctcctgcaagaagagctgctgttcctgctgccccgtggntgttgncaagtgtgcccagggctgcgtctgcaaaggggcatcggagaagtgcagctgctgtgcctgatgtgggaacagctcttctcccagatgtaaatagaacaacctgcacaacctggatttttttaaaaatacaacactgagccatttgctgcatttcttttttatactaaaatatgtgactggacaataaaaacaatttttggacttttaaaaaaaaaaaaaaaaaaaagaatctttanttaaaggcggccgnaagctttttncccttttgtgaggggttaattttnggcttgggcactgggccttcgttttacancgtcgtgatnggggaaaaccnggtt

SEQ ID NO: 628 - protein, 144 aa, Homo sapiens
MYSEIQRERADIGGLMARPEYREWNPELIKPKKLLNPVKASRSHQELHRELLMNHRRGLGVDSKPELQRVLEHRRRNQLIKKKKEELEAKRLQCPFEQELLRRQQRLNQLEKPPEKEEDHAPEFIKVRENLRRIATLTSEEREL

SEQ ID NO: 629 - DNA, 3575 bp, Homo sapiens
aggcatcgaactgcggtagtacgggttacggaatcactgtcgatgccctagctggatcaatgtttcgatctgatacgccagcttggcacgaggctgcctcaggaagcttggcttccctcccatgggaagtgctggaatccactcttgcctgaccctcccataagaaacaagggaaattcctttacgtgagccgccttgctcagaacaaagcttggcgtgtttcttattcctcatcaatctgacaaaatgggtatttatttgtgcctctcaagcgtgtggcttggacatgatgttccgcatcgtggaagtggccgtgcaccaagtggaatatctgttactatagtaacagttcctttttattgataccagaataaacaggaatgcaaaggctgtctcacttgttggcacatttcagcagcctccgttcccagaggtttaagaaccgccctctagaggcagccctccttgctagtctgggacttcccggtggagtgaggaacccagcaacacgctcctgacttcccttcccaaggactcgacctgagaaggacacagcagtctctgaatttcatgctctcctctttgatgtgaagaaaatgaaaagctgaacagttgtggaactgtggatagagttagacaataaggccgccatgtactcggagatccagagggagcgggcagacattgggggcctgatggcccggccagaatacagagagtggaatccggagctcatcaagcccaagaagctgctgaaccccgtgaaggcctctcggagtcaccaggagctccaccgggagctgctcatgaaccacagaaggggccttggtgtggacagcaagccagagctgcagcgtgtcctagagcaccgccggcggaaccagctcatcaagaagaagaaggaggagctggaagccaagcggctgcagtgcccctttgagcaggagctgctgagacggcaacagaggctgaaccagctggaaaaaccaccagagaaggaagaggatcacgcccccgagtttattaaagtcagggaaaacctgcggagaattgccacactgaccagcgaagagagagagctgtagggccagctgccgggctcaggccactgcccaccctggcctggacagcctccttcagcccttctgtacctggcagccctgggccccaggccctgggacgtctgtgatgttcccacctgcttctgtagaaatgtgtcaccccagagggcctggctctccctgggaggctggggcccctaagctcctaggttttccttccaagcacccagccctcctgctccaagagggataacctgcacccctccctgcaaggggttcagagcccagcacaggagctttctctggcagaattgaggaggaagaggtggccctctgacttgacaagccttctgttctgcccaggccttcccaccaggaatctccgaggctccccagggccccgcttctccgtacaccccagctcctaggtctcagagaactcccccacctgtggttttacctgcagccagcagagcttagcttcaaggacacctgccttcaaagccactgaggggaggaagggcagggcagactgcaggtggccttgttgctggcatcccggccaggtgggcggggattaacaaagacagctgtttagggtcttctcccttaacccatgctttcataaaccccttcggacagcttccccgtccaggctttctaaccacacctacccagggtgccgcattcctgcactcagaagtctgcagggtgcctcacaaacttgattgtgcataaaaatcactggggatcttgttaatacagcttctaactcaatagatctgggagatcctgcatttctaacaagctcccaggtaaggcggaggctgctggtgtgaggaccatgctgtgagcagcagggcgagagtgcccagggctgatatatattggaaatatcacccctgaagccatcgctggcccccacctcctgtggactgatgccccagggattcccaccccacttctgcaaccccaggtatccttcattatccaccccatcccagactcccaccccagggattgcccgtgaagactttggcctagcaaattgtgttggttatgtgagtgttgttttaatcagagatgtacatgattgccaatctgcatttcttaccagtgtgaccacactgttacgatgcaattctagccaaaaaaaaaaaaaaaaaaaaaaaaaaattttttttttttactttttcctagtcttatggaaagcaaatatacaatgattttcagtaggcttctggaatagaaacagtggtttgaagaccccactgccacctttatggactggcccctttgagtctgaatccccggcctctgtcacctgagacccaacccctagctgggccaactccagtgaattcacccatttttcttcttcagaaggcctttcctgtgtgagacccacatattttaaccttttgctcctatcccatttttaaagaattagagaataaaccaggcctgtttcttttcccctgaaatccctgcctctggcttcctaaacccatcatctaaggtgacagagcagtgctggaatagcatctcctttcactttcccaaaactgccacagatagctgccactggcatgctctttgattcctggaagcaaacgtgggactgtcggaggaaagggattgttctggtcttactcataactgggtggtttgagggtgactgaagtcgtgcttttcctgtgtgtgctgccagcacagggctgtaaatgcagatattgcgcctgtgtgcgtgtgtataagtcaagctccaagaggctcctgaatgtgactggcgtgctgagaatgtgtttacgctgtttaatgtctgccaggtgagggttacactgaagatgcacaatccctaaaataaagatcaccacttccccaaagaagcagccctcgggtccatgtgttgttcagacatgtgaagagaagcaagacagagggtctcagatggacgagggctctccaagggaatgcctggggattcacccagtggtccccagaggtgctccatggaggcaacaagtcattccatgaagccccagaggtagaagggacctcaagcaccacgccctccagggcagccgtgcagacgaccttggttcacttttcaggggtcgtcccaactctgtatctccagccactccaactgtggaggctgtaaatccagattttcactgttccagtctcctttgcagcttaggatggctatgtgatcaggtgtggccaatgaaattgaagaggaagtctacctgggcttctgggaaagcttttccaataaaagacacaggcatggctaacacctccctgggcctcttcttcctaccttgattgagggtgtgatgcctggagccacagcagccactttgctaccatgacaaaaaggccaagagaatcacagagtcattgaccctatcattatttcaccaagccaataccagccgccatccttctccagaattcttgtaaataaaataaatccctctttgtttaaaaaaaaaaaaaaaaaaaaaa

SEQ ID NO: 630 - protein, 61 aa, Homo sapiens
MDPNCSCEAGGSCACAGSCKCKKCKCTSCKKSCCSCCPLGCAKCAQGCICKGASEKCSCCA

SEQ ID NO: 631 - DNA, 367 bp, Homo sapiens
ctccagtctcacctcggcttgcaatggaccccaactgctcctgcgaggctggtggctcctgcgcctgcgccggctcctgcaagtgcaaaaagtgcaaatgcacctcctgcaagaagagctgctgctcctgttgccccctgggctgtgccaagtgtgcccagggctgcatctgcaaaggggcgtcagagaagtgcagctgctgtgcctgatgtcgggacagccctgctgtcagatgaaaacagaatgacacgtaaaatccgaggttttttttttctacaactccgactcatttgctacattcctttttttctgtgaaatatgtgaataataattaaacacttagacttgaaaaaaaaaaaaaaaaaaa

SEQ ID NO: 632 - protein, 591 aa, Homo sapiens
MAPEINLPGPMSLIDNTKGQLVVNPEALKILSAITQPVVVVAIVGLYRTGKSYLMNKLAGKKNGFSLGSTVKSHTKGIWMWCVPHPKKPEHTLVLLDTEGLGDIEKGDNENDSWIFALAILLSSTFVYNSMGTINQQAMDQLHYVTELTDRIKANSSPGNNSVDDSADFVSFFPAFVWTLRDFTLELEVDGEPITADDYLELSLKLRKGTDKKSKSFNDPRLCIRKFFPKRKCFVFDWPAPKKYLAHLEQLKEEELNPDFIEQVAEFCSYILSHSNVKTLSGGIAVNGPRLESLVLTYVNAISSGDLPCMENAVLALAQIENSAAVEKAIAHYEQQMGQKVQLPTETLQELLDLHRDSEREAIEVFMKNSFKDVDQMFQRKLGAQLEARRDDFCKQNSKASSDCCMALLQDIFGPLEEDVKQGTFSKPGGYRLFTQKLQELKNKYYQVPRKGIQAKEVLKKYLESKEDVADALLQTDQSLSEKEKAIEVERIKAESAEAAKKMLEEIQKKNEEMMEQKEKSYQEHVKQLTEKMERDRAQLMAEQEKTLALKLQEQERLLKEGFENESKRLQKDIWDIQMRSKSLEPICNIL

SEQ ID NO: 633 - DNA, 2107 bp, Homo sapiens
agtaaaagtccacagttaccgtgagagaaaaaaagaggagaaagcagtgcagccaaactcggaagaaaagagaggaggaaaaggactcgactttcacattggaacaaccttctttccagtgctaaggctctctgatctggggaacaacacctggacatggctccagagatcaacttgccgggcccaatgagcctcattgataacactaaagggcagctggtggtgaatccagaagctctgaagatcctatctgcaattacgcagcctgtggtggtggtggcgattgtgggcctctatcgcacaggcaaatcctacctgatgaacaagctggctgggaagaaaaacggcttctctctaggctccacagtgaagtctcacaccaagggaatctggatgtggtgtgtgcctcatcccaagaagccagaacacaccctagttctgctcgacactgagggcctgggagatatagagaagggtgacaatgagaatgactcctggatctttgccttggccatcctcctgagcagcaccttcgtgtacaatagcatgggaaccatcaaccagcaggccatggaccaacttcactatgtgacagagctgacagatcgaatcaaggcaaactcctcacctggtaacaattctgtagacgactcagctgactttgtgagcttttttccagcatttgtgtggactctcagagatttcaccctggaactggaagtagatggagaacccatcactgctgatgactacttggagctttcgctaaagctaagaaaaggtactgataagaaaagtaaaagctttaatgatcctcggttgtgcatccgaaagttcttccccaagaggaagtgcttcgtcttcgattggcccgctcctaagaagtaccttgctcacctagagcagctaaaggaggaagagctgaaccctgatttcatagaacaagttgcagaattttgttcctacatcctcagccattccaatgtcaagactctttcaggtggcattgcagtcaatgggcctcgtctagagagcctggtgctgacctacgtcaatgccatcagcagtggggatctaccctgcatggagaacgcagtcctggccttggcccagatagagaactcagccgcagtggaaaaggctattgcccactatgaacagcagatgggccagaaggtgcagctgcccacggaaaccctccaggagctgctggacctgcacagggacagtgagagagaggccattgaagtcttcatgaagaactctttcaaggatgtggaccaaatgttccagaggaaattaggggcccagttggaagcaaggcgagatgacttttgtaagcagaattccaaagcatcatcagattgttgcatggctttacttcaggatatatttggccctttagaagaagatgtcaagcagggaacattttctaaaccaggaggttaccgtctctttactcagaagctgcaggagctgaagaataagtactaccaggtgccaaggaaggggatacaggccaaagaggtgctgaaaaaatatttggagtccaaggaggatgtggctgatgcacttctacagactgatcagtcactctcagaaaaggaaaaagcgattgaagtggaacgtataaaggctgaatctgcagaagctgcaaagaaaatgttggaggaaatacaaaagaagaatgaggagatgatggaacagaaagagaagagttatcaggaacatgtgaaacaattgactgagaagatggagagggacagggcccagttaatggcagagcaagagaagaccctcgctcttaaacttcaggaacaggaacgccttctcaaggagggattcgagaatgagagcaagagacttcaaaaagacatatgggatatccagatgagaagcaaatcattggagccaatatgtaacatactctaaaagtccaaggagcaaaatttgcctgtccagctccctctccccaagaaacaacatgaatgagcaacttcagagtgtcaaacaactgccattaaacttaactcaaaatcatgatgcatgcatttttgttgaaccataaagtttgcaaagtaaaggttaagtatgaggtcaatgtttt

SEQ ID NO: 634 - protein, 1338 aa, Homo sapiens
MVSYWDTGVLLCALLSCLLLTGSSSGSKLKDPELSLKGTQHIMQAGQTLHLQCRGEAAHKWSLPEMVSKESERLSITKSACGRNGKQFCSTLTLNTAQANHTGFYSCKYLAVPTSKKKETESAIYIFISDTGRPFVEMYSEIPEIIHMTEGRELVIPCRVTSPNITVTLKKFPLDTLIPDGKRIIWDSRKGFIISNATYKEIGLLTCEATVNGHLYKTNYLTHRQTNTIIDVQISTPRPVKLLRGHTLVLNCTATTPLNTRVQMTWSYPDEKNKRASVRRRIDQSNSHANIFYSVLTIDKMQNKDKGLYTCRVRSGPSFKSVNTSVHIYDKAFITVKHRKQQVLETVAGKRSYRLSMKVKAFPSPEVVWLKDGLPATEKSARYLTRGYSLIIKDVTEEDAGNYTILLSIKQSNVFKNLTATLIVNVKPQIYEKAVSSFPDPALYPLGSRQILTCTAYGIPQPTIKWFWHPCNHNHSEARCDFCSNNEESFILDADSNMGNRIESITQRMAIIEGKNKMASTLVVADSRISGIYICIASNKVGTVGRNISFYITDVPNGFHVNLEKMPTEGEDLKLSCTVNKFLYRDVTWILLRTVNNRTMHYSISKQKMAITKEHSITLNLTIMNVSLQDSGTYACRARNVYTGEEILQKKEITIRDQEAPYLLRNLSDHTVAISSSTTLDCHANGVPEPQITWFKNNHKIQQEPGIILGPGSSTLFIERVTEEDEGVYHCKATNQKGSVESSAYLTVQGTSDKSNLELITLTCTCVAATLFWLLLTLLIRKMKRSSSEIKTDYLSIIMDPDEVPLDEQCERLPYDASKWEFARERLKLGKSLGRGAFGKVVQASAFGIKKSPTCRTVAVKMLKEGATASEYKALMTELKILTHIGHHLNVVNLLGACTKQGGPLMVIVEYCKYGNLSNYLKSKRDLFFLNKDAALHMEPKKEKMEPGLEQGKKPRLDSVTSSESFASSGFQEDKSLSDVEEEEDSDGFYKEPITMEDLISYSFQVARGMEFLSSRKCIHRDLAARNILLSENNVVKICDFGLARDIYKNPDYVRKGDTRLPLKWMAPESIFDKIYSTKSDVWSYGVLLWEIFSLGGSPYPGVQMDEDFCSRLREGMRMRAPEYSTPEIYQIMLDCWHRDPKERPRFAELVEKLGDLLQANVQQDGKDYIPINAILTGNSGFTYSTPAFSEDFFKESISAPKFNSGSSDDVRYVNAFKFMSLERIKTFEELLPNATSMFDDYQGDSSTLLASPMLKRFTWTDSKPKASLKIDLRVTSKSKESGLSDVSRPSFCHSSCGHVSEGKRRFTYDHAELERKIACCSPPPDYNSVVLYSTPPI

SEQ ID NO: 635 - DNA, 7680 bp, Homo sapiens
gcggacactcctctcggctcctccccggcagcggcggcggctcggagcgggctccggggctcgggtgcagcggccagcgggcctggcggcgaggattacccggggaagtggttgtctcctggctggagccgcgagacgggcgctcagggcgcggggccggcggcggcgaacgagaggacggactctggcggccgggtcgttggccgggggagcgcgggcaccgggcgagcaggccgcgtcgcgctcaccatggtcagctactgggacaccggggtcctgctgtgcgcgctgctcagctgtctgcttctcacaggatctagttcaggttcaaaattaaaagatcctgaactgagtttaaaaggcacccagcacatcatgcaagcaggccagacactgcatctccaatgcaggggggaagcagcccataaatggtctttgcctgaaatggtgagtaaggaaagcgaaaggctgagcataactaaatctgcctgtggaagaaatggcaaacaattctgcagtactttaaccttgaacacagctcaagcaaaccacactggcttctacagctgcaaatatctagctgtacctacttcaaagaagaaggaaacagaatctgcaatctatatatttattagtgatacaggtagacctttcgtagagatgtacagtgaaatccccgaaattatacacatgactgaaggaagggagctcgtcattccctgccgggttacgtcacctaacatcactgttactttaaaaaagtttccacttgacactttgatccctgatggaaaacgcataatctgggacagtagaaagggcttcatcatatcaaatgcaacgtacaaagaaatagggcttctgacctgtgaagcaacagtcaatgggcatttgtataagacaaactatctcacacatcgacaaaccaatacaatcatagatgtccaaataagcacaccacgcccagtcaaattacttagaggccatactcttgtcctcaattgtactgctaccactcccttgaacacgagagttcaaatgacctggagttaccctgatgaaaaaaataagagagcttccgtaaggcgacgaattgaccaaagcaattcccatgccaacatattctacagtgttcttactattgacaaaatgcagaacaaagacaaaggactttatacttgtcgtgtaaggagtggaccatcattcaaatctgttaacacctcagtgcatatatatgataaagcattcatcactgtgaaacatcgaaaacagcaggtgcttgaaaccgtagctggcaagcggtcttaccggctctctatgaaagtgaaggcatttccctcgccggaagttgtatggttaaaagatgggttacctgcgactgagaaatctgctcgctatttgactcgtggctactcgttaattatcaaggacgtaactgaagaggatgcagggaattatacaatcttgctgagcataaaacagtcaaatgtgtttaaaaacctcactgccactctaattgtcaatgtgaaaccccagatttacgaaaaggccgtgtcatcgtttccagacccggctctctacccactgggcagcagacaaatcctgacttgtaccgcatatggtatccctcaacctacaatcaagtggttctggcacccctgtaaccataatcattccgaagcaaggtgtgacttttgttccaataatgaagagtcctttatcctggatgctgacagcaacatgggaaacagaattgagagcatcactcagcgcatggcaataatagaaggaaagaataagatggctagcaccttggttgtggctgactctagaatttctggaatctacatttgcatagcttccaataaagttgggactgtgggaagaaacataagcttttatatcacagatgtgccaaatgggtttcatgttaacttggaaaaaatgccgacggaaggagaggacctgaaactgtcttgcacagttaacaagttcttatacagagacgttacttggattttactgcggacagttaataacagaacaatgcactacagtattagcaagcaaaaaatggccatcactaaggagcactccatcactcttaatcttaccatcatgaatgtttccctgcaagattcaggcacctatgcctgcagagccaggaatgtatacacaggggaagaaatcctccagaagaaagaaattacaatcagagatcaggaagcaccatacctcctgcgaaacctcagtgatcacacagtggccatcagcagttccaccactttagactgtcatgctaatggtgtccccgagcctcagatcacttggtttaaaaacaaccacaaaatacaacaagagcctggaattattttaggaccaggaagcagcacgctgtttattgaaagagtcacagaagaggatgaaggtgtctatcactgcaaagccaccaaccagaagggctctgtggaaagttcagcatacctcactgttcaaggaacctcggacaagtctaatctggagctgatcactctaacatgcacctgtgtggctgcgactctcttctggctcctattaaccctccttatccgaaaaatgaaaaggtcttcttctgaaataaagactgactacctatcaattataatggacccagatgaagttcctttggatgagcagtgtgagcggctcccttatgatgccagcaagtgggagtttgcccgggagagacttaaactgggcaaatcacttggaagaggggcttttggaaaagtggttcaagcatcagcatttggcattaagaaatcacctacgtgccggactgtggctgtgaaaatgctgaaagagggggccacggccagcgagtacaaagctctgatgactgagctaaaaatcttgacccacattggccaccatctgaacgtggttaacctgctgggagcctgcaccaagcaaggagggcctctgatggtgattgttgaatactgcaaatatggaaatctctccaactacctcaagagcaaacgtgacttattttttctcaacaaggatgcagcactacacatggagcctaagaaagaaaaaatggagccaggcctggaacaaggcaagaaaccaagactagatagcgtcaccagcagcgaaagctttgcgagctccggctttcaggaagataaaagtctgagtgatgttgaggaagaggaggattctgacggtttctacaaggagcccatcactatggaagatctgatttcttacagttttcaagtggccagaggcatggagttcctgtcttccagaaagtgcattcatcgggacctggcagcgagaaacattcttttatctgagaacaacgtggtgaagatttgtgattttggccttgcccgggatatttataagaaccccgattatgtgagaaaaggagatactcgacttcctctgaaatggatggctcccgaatctatctttgacaaaatctacagcaccaagagcgacgtgtggtcttacggagtattgctgtgggaaatcttctccttaggtgggtctccatacccaggagtacaaatggatgaggacttttgcagtcgcctgagggaaggcatgaggatgagagctcctgagtactctactcctgaaatctatcagatcatgctggactgctggcacagagacccaaaagaaaggccaagatttgcagaacttgtggaaaaactaggtgatttgcttcaagcaaatgtacaacaggatggtaaagactacatcccaatcaatgccatactgacaggaaatagtgggtttacatactcaactcctgccttctctgaggacttcttcaaggaaagtatttcagctccgaagtttaattcaggaagctctgatgatgtcagatatgtaaatgctttcaagttcatgagcctggaaagaatcaaaacctttgaagaacttttaccgaatgccacctccatgtttgatgactaccagggcgacagcagcactctgttggcctctcccatgctgaagcgcttcacctggactgacagcaaacccaaggcctcgctcaagattgacttgagagtaaccagtaaaagtaaggagtcggggctgtctgatgtcagcaggcccagtttctgccattccagctgtgggcacgtcagcgaaggcaagcgcaggttcacctacgaccacgctgagctggaaaggaaaatcgcgtgctgctccccgcccccagactacaactcggtggtcctgtactccaccccacccatctagagtttgacacgaagccttatttctagaagcacatgtgtatttatacccccaggaaactagcttttgccagtattatgcatatataagtttacacctttatctttccatgggagccagctgctttttgtgatttttttaatagtgctttttttttttgactaacaagaatgtaactccagatagagaaatagtgacaagtgaagaacactactgctaaatcctcatgttactcagtgttagagaaatccttcctaaacccaatgacttccctgctccaacccccgccacctcagggcacgcaggaccagtttgattgaggagctgcactgatcacccaatgcatcacgtaccccactgggccagccctgcagcccaaaacccagggcaacaagcccgttagccccaggggatcactggctggcctgagcaacatctcgggagtcctctagcaggcctaagacatgtgaggaggaaaaggaaaaaaagcaaaaagcaagggagaaaagagaaaccgggagaaggcatgagaaagaatttgagacgcaccatgtgggcacggagggggacggggctcagcaatgccatttcagtggcttcccagctctgacccttctacatttgagggcccagccaggagcagatggacagcgatgaggggacattttctggattctgggaggcaagaaaaggacaaatatcttttttggaactaaagcaaattttagacctttacctatggaagtggttctatgtccattctcattcgtggcatgttttgatttgtagcactgagggtggcactcaactctgagcccatacttttggctcctctagtaagatgcactgaaaacttagccagagttaggttgtctccaggccatgatggccttacactgaaaatgtcacattctattttgggtattaatatatagtccagacacttaactcaatttcttggtattattctgttttgcacagttagttgtgaaagaaagctgagaagaatgaaaatgcagtcctgaggagagttttctccatatcaaaacgagggctgatggaggaaaaaggtcaataaggtcaagggaagaccccgtctctataccaaccaaaccaattcaccaacacagttgggacccaaaacacaggaagtcagtcacgtttccttttcatttaatggggattccactatctcacactaatctgaaaggatgtggaagagcattagctggcgcatattaagcactttaagctccttgagtaaaaaggtggtatgtaatttatgcaaggtatttctccagttgggactcaggatattagttaatgagccatcactagaagaaaagcccattttcaactgctttgaaacttgcctggggtctgagcatgatgggaatagggagacagggtaggaaagggcgcctactcttcagggtctaaagatcaagtgggccttggatcgctaagctggctctgtttgatgctatttatgcaagttagggtctatgtatttaggatgcgcctactcttcagggtctaaagatcaagtgggccttggatcgctaagctggctctgtttgatgctatttatgcaagttagggtctatgtatttaggatgtctgcaccttctgcagccagtcagaagctggagaggcaacagtggattgctgcttcttggggagaagagtatgcttccttttatccatgtaatttaactgtagaacctgagctctaagtaaccgaagaatgtatgcctctgttcttatgtgccacatccttgtttaaaggctctctgtatgaagagatgggaccgtcatcagcacattccctagtgagcctactggctcctggcagcggcttttgtggaagactcactagccagaagagaggagtgggacagtcctctccaccaagatctaaatccaaacaaaagcaggctagagccagaagagaggacaaatctttgttgttcctcttctttacacatacgcaaaccacctgtgacagctggcaattttataaatcaggtaactggaaggaggttaaactcagaaaaaagaagacctcagtcaattctctacttttttttttttttttccaaatcagataatagcccagcaaatagtgataacaaataaaaccttagctgttcatgtcttgatttcaataattaattcttaatcattaagagaccataataaatactccttttcaagagaaaagcaaaaccattagaattgttactcagctccttcaaactcaggtttgtagcatacatgagtccatccatcagtcaaagaatggttccatctggagtcttaatgtagaaagaaaaatggagacttgtaataatgagctagttacaaagtgcttgttcattaaaatagcactgaaaattgaaacatgaattaactgataatattccaatcatttgccatttatgacaaaaatggttggcactaacaaagaacgagcacttcctttcagagtttctgagataatgtacgtggaacagtctgggtggaatggggctgaaaccatgtgcaagtctgtgtcttgtcagtccaagaagtgacaccgagatgttaattttagggacccgtgccttgtttcctagcccacaagaatgcaaacatcaaacagatactcgctagcctcatttaaattgattaaaggaggagtgcatctttggccgacagtggtgtaactgtgtgtgtgtgtgtgtgtgtgtgtgtgtgtgtgtgtgtgtgggtgtgggtgtatgtgtgttttgtgcataactatttaaggaaactggaattttaaagttacttttatacaaaccaagaatatatgctacagatataagacagacatggtttggtcctatatttctagtcatgatgaatgtattttgtataccatcttcatataatatacttaaaaatatttcttaattgggatttgtaatcgtaccaacttaattgataaacttggcaactgcttttatgttctgtctccttccataaatttttcaaaatactaattcaacaaagaaaaagctcttttttttcctaaaataaactcaaatttatccttgtttagagcagagaaaaattaagaaaaactttgaaatggtctcaaaaaattgctaaatattttcaatggaaaactaaatgttagtttagctgattgtatggggttttcgaacctttcactttttgtttgttttacctatttcacaactgtgtaaattgccaataattcctgtccatgaaaatgcaaattatccagtgtagatatatttgaccatcaccctatggatattggctagttttgcctttattaagcaaattcatttcagcctgaatgtctgcctatatattctctgctctttgtattctcctttgaacccgttaaaacatcctgtggcactc

SEQ ID NO: 636 - protein, 218 aa, Homo sapiens
MSSGAASGTGRGRPRGGGPGPGDPPPSETHKLVVVGGGGVGKSALTIQFIQSYFVSDYDPTIEDSYTKICSVDGIPARLDILDTAGQEEFGAMREQYMRAGHGFLLVFAINDRQSFNEVGKLFTQILRVKDRDDFPVVLVGNKADLESQRQVPRSEASAFGASHHVAYFEASAKLRLNVDEAFEQLVRAVRKYQEQELPPSPPSAPRKKGGGCPCVLL

SEQ ID NO: 637 - DNA, 3350 bp, Homo sapiens
agctacccaaagagaaggggacagagacccagagagagagagtaatagagactcagagagacagaggggacagagacccagagaaaagggggcagagacccagcaacaaggacagacatctggagagagagagaaggacagggcagggcgcagtggctcacatctgtaatcccagcactttgggagacccaggcgggcggatcacctgaggtcaggagttcgagaccagcctgaccaacacagcctgaccaacacatctctactaaaaatacaaaattagccaggtgtggtggcgcatgcctgtaatcccagctacttgggaggctgaggcaggagaatctcttgaacccaggaggcagaggttgcagtgagccgagatctcgccattgcactccagcctgtgcaacaagagcgaaactccgtctcaaaaaaaaaaaaaaaaaaaaaaagattcagagagacagacgggacagagacccagagaaaagggggcagagacccagcaacagggacagacatttagagagagagggacagagactgagagaggcatcccaagggcagggcttcgtcctgtctgccggggcactgcagtaactatcctctccccaccccgccagtcctacttcgtgtctgactacgaccccactattgaggactcctacacgaagatctgcagtgtggatggcatcccagcccggctggacagtgagggcggcaaggatggatgatggatgggggtggtgtcagtgggggctgagtgctcttgggggtgactgcggggagcctggtccccacaatggcccctctccctgtctctgcagtcctggacaccgcgggccaggaagagttcggggccatgagagagcagtacatgcgtgctggccacggcttcctgctggtgttcgccattaatgaccggcagaggtgacaggggttactggtggcggagcagtgggtgggtgtggggaggacctgggctctgcagctggctggacctcatgcctccggcttcactcgcagtttcaacgaggtgggcaagctcttcacgcagattctgcgggtcaaggaccgcgacgacttccccgttgtgttggtcgggaacaaggcagatctggagtcacagcgccaggttcgggacacccctctttctggggaccccatctcagtctgggaggctccttccagcacacctgtcccccatcagcatcctcctctgttcctgcagtgctgcgactgccactgtcacacagctcacctagatgggttacccccaaactggaccttcagggtccccggcatcaccgagcagagggcctagcatgcaagtgtcctcaggagaggctgctggacggaacaaaggacattcaccccccgtccgccagctctctttgccccttcctcgcattcctcccttccagccaacctcccaccagccccagcacctcccctgctcatggccggccccctccatggctccccagttcctccccaggtgccagatgccccgcacagttgcgcccctcctttccctgctcccatcacttcccccacaacgatttccacacagaactcatccatctggcaaaggctctggggatttccaggctttggggttccgcctgcctctgccgggaacaccctgacttccctgcctgcccactcctggttatctaaggcatagcagggcaagtgcccacgaagcctgcccccatcccttacttagaagacaccaagcccctgcggcatctccctccataatctctcaggagctcttcctctttgagttctcacagtgggtcacctctcctagagtatccagcctgcctgtctgtctctctggctgcggtcaccctgagtgcagggacctgactcccccgtgtcccccctacccccaggtcccccgatcagaagcctctgccttcggcgcctcccaccacgtggcctactttgaggcctcggccaaactgcgtctcaacgtggacgaggcttttgagcagctggtgcgggctgtccggtgagccaagtccccttcctgtcgtccttgtccccagcccttccactccaaactcactggcgttttcccacaggaaataccaggaacaagagctcccaccgagccctcccagtgcccccaggaagaagggcgggggctgcccctgcgtcctcctgtagcccaggcaagagagaagcaaccaccacaagctctcgggactagctgccttcgcaccttgctgtgtgacctgaggccctcactgagcctcaatttcctcatctgggtctcccaggacacatcacatacccacccttacttcctggcctcttctgggctactgccactgtgtgccttctgccaacgcctcctgtccccacctaagcctggtgggggtgaggggctccgggtcactgctgtatataactcccctcccccagaaaaataaatgtcactgccaacgtcaggaggtgctttctaaaaaggtaatgagggtcgggcactgtggctcactcctgtaatcgcagcattttgggaggccaatgcgggaggaccgcttgagtccaggagtttttgaccagcctgggcagcatagcgagacccccatctcttaaaaaaaaagggtgggggaatgaactctgggaaggtgaacgaattcatgccacatagcgagaccccatctctacaacaaaatgaaaaattagccaagtgtgcactcgtagtcccagctacttgggaggctgaggcaggaggattgcttgagcccaggaggttgaggctacagagttgtgatcacgcgactgcactccagcctgggcaacacagtgacaccctgtctcaaataaataaataaaatgtaaaaaacgaagtgttcctaggacacagatgggctttgggtatccagactgaagtgtgtcatccatttacccactgtggccttaagacacccaacacttctgcttctcccaggacagaatagggggttggatgggggatgtccacactgaccccaaattggattaagtgtttagattcagatttcagtgctactgggaactttctgaaaatgaggacttgccagacggctgcttggacaccattccacccacctgtcccttctcgatatacattgaaggtgagagtgggacaggcagggtttgtagcagttgctccctgtctctatttttgtagacagagtctagctcttgcccaggctggtctcaaactcctggcctcaagtgatccacccatttcggtctcccaaagtactgggcttacaagcgtgagctaccacacccagcagctgagttgctgcctgtctccaatgtcctagaacgttctattggaatgttctaga

SEQ ID NO: 638-639 - skipped (2 entries)

SEQ ID NO: 640 - protein, 218 aa, Homo sapiens; identical to SEQ ID NO: 636

SEQ ID NO: 641 - DNA, 3350 bp, Homo sapiens; identical to SEQ ID NO: 637

SEQ ID NO: 642 - protein, 492 aa, Homo sapiens
MDFLLGNPFSSPVGQRIEKATDGSLQSEDWALNMEICDIINETEEGPKDALRAVKKRIVGNKNFHEVMLALTVLETCVKNCGHRFHVLVASQDFVESVLVRTILPKNNPPTIVHDKVLNLIQSWADAFRSSPDLTGVVTIYEDLRRKGLEFPMTDLDMLSPIHTPQRTVFNSETQSGQDSVGTDSSQQEDSGQHAAPLPAPPILSGDTPIAPTPEQIGKLRSELEMVSGNVRVMSEMLTELVPTQAEPADLELLQELNRTCRAMQQRVLELIPQIANEQLTEELLIVNDNLNNVFLRHERFERFRTGQTTKAPSEAEPAADLIDMGPDPAATGNLSSQLAGMNLGSSSVRAGLQSLEASGRLEDEFDMFALTRGSSLADQRKEVKYEAPQATDGLAGALDARQQSTGAIPVTQACLMEDIEQWLSTDVGNDAEEPKGVTSEEFDKFLEERAKAADRLPNLSSPSAEGPPGPPSGPAPRKKTQEKDDDMLFAL

SEQ ID NO: 643 - DNA, 2310 bp, Homo sapiens
ggtggcgctggcggttgctgtcagctgattcccggggttggtggcagcggcggtagcagcaatggactttctcctggggaacccgttcagctctccagtgggacagcgcatcgagaaagccacagatggctccctgcagagcgaggactgggccctcaacatggagatctgcgacatcatcaacgagacggaggaaggtcccaaagatgccctccgagcagtaaagaagagaatcgtggggaataagaacttccacgaggtgatgctggctctcacagtcttagaaacctgtgtcaagaactgcgggcaccgcttccacgtgctggtggccagccaggacttcgtggagagtgtgctggtgaggaccatcctgcccaagaacaacccacccaccatcgtgcatgacaaagtgctcaacctcatccagtcctgggctgacgcgttccgcagctcgcccgatctgacaggtgtggtcaccatctatgaggacctgcggaggaaaggcctggagttccccatgactgacctggacatgctgtcacccatccacacaccccagaggaccgtgttcaactcagagacacaatcaggacaggattctgtgggcactgactccagccagcaagaggactctggccagcatgctgcccctctgcccgccccgcccatactctccggtgacacgcccatagcaccaaccccggaacagattgggaagctgcgcagtgagctggagatggtgagtgggaacgtgagggtgatgtcggagatgctgacggagctggtgcccacccaggccgagcccgcagacctggagctgctgcaggagctcaaccgcacgtgccgagccatgcagcagcgggtcctggagctcatccctcagatcgccaatgagcagctgacagaggagctgctcatcgtcaatgacaatctcaacaatgtgttcctgcgccatgaacggtttgaacggttccgaacaggccagaccaccaaggccccaagtgaggccgagccggcagctgacctgatcgacatgggccctgacccagcagccaccggcaacctctcatcccagctggcaggaatgaacctgggctccagcagtgtgagagctggcctgcagtctctggaggcctctggtcgactggaagatgagtttgacatgtttgcgctgacacggggcagctcactggctgaccaacggaaagaggtaaaatacgaagccccccaagcaacagacggcctggctggagccctggacgcccggcagcagagcactggcgcgatcccagtcacccaggcctgcctcatggaggacatcgagcagtggctgtccactgacgtgggtaatgatgcggaagagcctaagggggtcaccagcgaagaatttgacaaattcctggaagaacgggccaaagccgcggaccgattgcccaacctctccagcccctcagctgaggggcccccgggtcccccatctggcccagcgccccggaagaagacccaggagaaagatgatgacatgctgtttgccttatgagtgtggggtctggcaccctgcagcccaggtccccactgctctcacacccttaggctgggacctccctccctcctctggtgttaaggctgctttgggggtggcttgttacccccttttcctcctctttgaagacggagctgccccagctgtggctgggggtgtggaggcagtgggatgaactgggggacaggtctgcgctgcagtgggatctggctgctctgcctcctttcccaccccagctgaccatgagactttgctgagaagtggaggccccaggacaggctggctggctggctggctgcttgacccagtgtgactctccttcactgagtgataccctgctccgggcccatgccccaaggagcccttcagagcccacactgccagtcgaggcctggctggaggctggccacagtggaaattctgccgagcctcttgtcccttccctgctctgctgcatggggccccatggctttggctggccactgagggtagggtgtggaggtgtggaggccccctgaggagctgcggcggcccaggtacgaagctgcaactctgcgcgcagtgggcgagatctcatcagccccaggctgcaggtgaggcttcaggggatgctgggccccactgcccctccgctgccttgccctccatccttcctctgttccttctggccgggcaccacagcactggggctcacctcttggttgatcctcttgtactgggagaggtgccttttgtatccccaattaaaggtagaaaaccaccctgct

SEQ ID NO: 644 - protein, 727 aa, Homo sapiens [sequence omitted]

SEQ ID NO: 645 - DNA, 3115 bp, Homo sapiens
ccaccatatcggtcccgtatttcacattgataaggtcctgtttcatttctcgtgacattgggtagaatgaggatcctgttttcaatgggtcgctttaccctgggactgacagggaggctctgaccatttagccaccaaatgtaggtgtagttctcactcttaggttcaccccgcggccgatcgtcccccatacctcggccatgcggcccctgctgctactggccctgctgggctggctgctgctggccgaagcgaagggcgacgccaagccggaggacaaccttttagtcctcacggtggccactaaggagaccgagggattccgtcgcttcaagcgctcagctcagttcttcaactacaagatccaggcgcttggcctaggggaggactggaatgtggagaaggggacgtcggcaggtggagggcagaaggtccggctgctgaagaaagctctggagaagcacgcagacaaggaggatctggtcattctcttcacagacagctatgacgtgctgtttgcatcggggccccgggagctcctgaagaagttccggcaggccaggagccaggtggtcttctctgctgaggagctcatctacccagaccgcaggctggagaccaagtatccggtggtgtccgatggcaagaggttcctgggctctggaggcttcatcggttatgcccccaacctcagcaaactggtggccgagtgggagggccaggacagcgacagcgatcagctgttttacaccaagatcttcttggacccggagaagagggagcagatcaatatcaccctggaccaccgctgccgtatcttccagaacctggatggagccttggatgaggtcgtgctcaagtttgaaatgggccatgtgagagcgaggaacctggcctatgacaccctcccggtcctgatccatggcaacgggccaaccaagctgcagttgaactacctgggcaactacatcccgcgcttctggaccttcgaaacaggctgcaccgtgtgtgacgaaggcttgcgcagcctcaagggcattggggatgaagctctgcccacggtcctggtcggcgtgttcatcgaacagcccacgccgtttgtgtccctgttcttccagcggctcctgcggctccactacccccagaaacacatgcgacttttcatccacaaccacgagcagcaccacaaggctcaggtggaagagttcctggcacagcatggcagcgagtaccagtctgtgaagctggtgggccctgaggtgcggatggcgaatgcagatgccaggaacatgggcgcagacctgtgccggcaggaccgcagctgcacctactacttcagcgtggatgctgacgtggccctgaccgagcccaacagcctgcggctgctgatccaacagaacaagaatgtcattgccccgctgatgacccggcatgggaggctgtggtcgaacttctggggggctctcagtgcagatggctactatgcccgttccgaggactacgtggacattgtgcaggggcggcgtgttggtgtctggaatgtgccctatatttcaaacatctacttgatcaagggcagtgccctgcggggtgagctgcagtcctcagatctcttccaccacagcaagctggaccccgacatggccttctgtgccaacatccggcagcaggatgtgttcatgttcctgaccaaccggcacacccttggccatctgctctccctagacagctaccgcaccacccacctgcacaacgacctctgggaggtgttcagcaaccccgaggactggaaggagaagtacatccaccagaactacaccaaagccctggcagggaagctggtggagacgccctgcccggatgtctattggttccccatcttcacggaggtggcctgtgatgagctggtggaggagatggagcactttggccagtggtctctgggcaacaacaaggacaaccgcatccagggtggctacgagaacgtgccgactattgacatccacatgaaccagatcggctttgagcgggagtggcacaaattcctgctggagtacattgcgcccatgacggagaagctctaccccggctactacaccagggcccagtttgacctggcctttgtcgtccgctacaagcctgatgagcagccctcactgatgccacaccatgatgcctccaccttcaccatcaacatcgccctgaaccgagtcggggtggattacgagggcgggggctgtcggttcctgcgctacaactgttccatccgagccccaaggaagggctggaccctcatgcaccctggacgactcacgcattaccatgaggggctccccaccaccaggggcacccgctacatcgcagtctccttcgtcgatccctaattggccaggcctgaccctcttggacctttcttctttgccgacaaccactgcccagcagcctctgggacctcggggtcccagggaacccagtccagcctcctggctgttgacttcccattgctcttggagccaccaatcaaagagattcaaagagattcctgcaggccagaggccggaacacacctttatggctggggctctccgtggtgttctggacccagcccctggagacaccattcacttttactgctttgtagtgactcgtgctctccaacctgtcttcctgaaaaaccaaggcccccttcccccacctcttccatggggtgagacttgagcagaacaggggcttccccaagttgcccagaaagactgtctgggtgagaagccatggccagagcttctcccaggcacaggtgttgcaccagggacttctgcttcaagttttggggtaaagacacctggatcagactccaagggctgccctgagtctgggacttctgcctccatggctggtcatgagagcaaaccgtagtcccctggagacagccactccagagaacctcttgggagacagaagaggcatctgtgcacagctcgatcttctacttgcctgtggggaggggagtgacaggtccacacaccacactgggtcaccctgtcctggatgcctctgaagagagggacagaccgtcagaaactggagagtttctattaaaggtcatttaaaccac

SEQ ID NO: 646 - protein, 609 aa, Homo sapiens
NYKTLIIICALFTLVTVLLWNKCSSDKAIQFPRRSSSGFRVDGFEKRAAASESNNYMNHVAKQQSEEAFPQEQQKAPPVVGGFNSNVGSKVLGLKYEEIDCLINDEHTIKGRREGNEVFLPFTWVEKYFDVYGKVVQYDGYDRFEFSHSYSKVYAQRAPYHPDGVFMSFEGYNVEVRDRVKCISGVEGVPLSTQWGPQGYFYPIQIAQYGLSHYSKNLTEKPPHIEVYETAEDRDKNKPNDWTVPKGCFMANVADKSRFTNVKQFIAPETSEGVSLQLGNTKDFIISFDLKFLTNGSVSVVLETTEKNQLFTIHYVSNAQLIAFKERDIYYGIGPRTSWSTVTRDLVTDLRKGVGLSNTKAVKPTKIMPKKVVRLIAKGKGFLDNITISTTAHMAAFFAASDWLVRNQDEKGGWPIMVTRKLGEGFKSLEPGWYSAMAQGQAISTLVRAYLLTKDHIFLNSALRATAPYKFLSEQHGVKAVFMNKHDWYEEYPTTPSSFVLNGFMYSLIGLYDLKETAGEKLGKEARSLYERGMESLKAMLPLYDTGSGTIYDLRHFMLGIAPNLARWDYHTTHINQLQLLSTIDESPIFKEFVKRWKSYLKGSRAKHN

SEQ ID NO: 647 - DNA, 4791 bp, Homo sapiens
caactataagactttgattattatctgcgcactcttcactttggtcacagtacttttgtggaataagtgttccagtgacaaagcaatccagtttccacggcgttcgagtagtggcttcagagtggatgggtttgaaaaaagagcagcagcatctgagagtaacaactatatgaaccacgtggccaaacaacagtctgaggaagcattccctcaggaacagcagaaagcaccccctgttgttgggggcttcaatagcaatgtgggaagtaaggtgttagggctcaaatatgaagaaattgactgtctcataaatgatgaacacacaattaaagggagacgagaggggaacgaagtctttcttccattcacttgggttgagaaatattttgatgtttatggaaaggtggttcagtatgatggctatgatcggtttgaattctctcatagctattccaaagtctatgcacagagagccccctatcaccccgatggtgtgtttatgtcttttgaaggctacaatgtggaagtccgagacagagtcaagtgcataagtggggttgaaggtgtgccattatctacacaatggggacctcaaggctatttctatccaatccagattgcacagtatggattaagtcattacagcaagaatctaactgagaaacctcctcacatagaggtatatgaaacagcagaagacagagacaaaaacaagcctaatgactggactgtgccaaagggctgctttatggcgaatgtggctgataagtctagattcaccaatgtcaaacagtttattgcaccagaaaccagtgaaggtgtatccttgcaactgggaaacacaaaagattttattatttcatttgacctcaagttcttgacaaatggaagtgtgtccgtggttctagagaccacagaaaagaatcagctcttcactatacattatgtctcaaatgctcagctaattgcttttaaagaaagagatatatactatggcattgggcccagaacttcatggagcacagttaccagggacctggtcactgacctcaggaaaggagtgggtctttcaaacacaaaagctgtcaagccaaccaaaataatgcccaagaaggtggttaggttgattgcaaaaggtaagggattcctcgacaacattaccatctctaccacagcccacatggctgcattttttgctgctagtgattggctagtaaggaaccaggatgagaaaggtggctggccaattatggtgacccgtaagttaggggaagggttcaagtctttagagccaggatggtattctgccatggcccaagggcaagccatttctacattagtcagggcctatctgttaacaaaagaccatatattcctcaattcagctttaagggcaacagccccttataagtttctatctgagcagcatggagttaaagctgtgtttatgaataaacatgactggtatgaagaatatccaaccacacctagctcttttgttttaaatggctttatgtattctttaattgggctgtatgacttaaaagaaactgcaggggaaaaactcggaaaagaagcaaggtccttgtatgagcgtggcatggaatctcttaaagccatgctgcccttgtatgacactggctcaggaaccatctatgacctccgtcacttcatgcttggcatcgctcctaacctggctcgctgggactatcataccacccacatcaatcagttgcagctactcagtaccattgatgagtccccaatcttcaaagaatttgtcaagaggtggaaaagctaccttaaaggcagcagggcaaagcacaactagagctcacaaccaaaactgcacttcagcctctgctgtacacagaaactacaggctctgtctcaggagagcataggcacattttaaaaggttatgtactaggtttttgtggattctatcaaagtgataagtgatccttaaaaccagccttctaaaataattgcattccatgggttgggtatttagaaatgtaggtggcatttagaacacaatgtttaatcaatgggctgaacaaagatgcttcactttgccttgcccatcaccctatacagtttcgcagatagtctagtcactctatgtgagaaagataatggtaagtagttgctactggccaactgtctagcacttacctgaaaacttagtatggagctcttttaaaatgtgattatttatatttatgttgaaagcggactttaaaaaaaataatgtgctgtaacacagtaaatatgtacttgtagcctggatagcagactgtgttcaactttttaaaaagatgtttcctttctatagattaatttcttgggagcaaatgagtatttgttgcatttgttcaatttgttgtatatggtgaatatttaattatggttttcttgaaacgtgtaaattaaaaacacaatcagtgttcaggcttcagttatataatgtaagcacaactaaaatgaaacttgttgactgcacaagaaattacaaaaatgtttctgttttgaaacttgatctacaatcagtaaaagtttgataatcagtatatcccttcccaacccccattgtgacagtttctttttgtcactgtctagaattttgtattttatttcagactataccttggagttttgtatattttgagagagatatttttgggacattattttggaaacttattacaaatctaaatttggaaaggagctagtagctttaaggccaccaccatattttacttttttaggatttttccccctttaaataaaaatattagatcaaatactatatgcaagaaatcatagcaaagtttttttttcctaccaagatcattcttgatcatcagcttcccaaactagtaagtctgtgcatcattgggtgtttttttttaatttaattttaaattatcccagctattagatagaagggatgttactgcacttatgtgtaatcagatctttatttaggtatacatatcctcctataccgcacataaatagatttcagagcccccatacaatgggcagtgtctgctatagggcttcaggcattaaataaaaccgagggttgttgattttgctgtgacagtacactaaatcaatactatatcttatacagtttgaaaatatgataccctacactttcaggggaccgagtctgacaaacacaatacatttatctgtgacctatatcaagtacacatttaggagccaggtaggttacctgcttacacactatattttaattgaattcaaactatcaagcactacttagaaactggaaaacatatatatgttagcatcaaagggggcagaagcaaagaagatacagatctgcactgaagacattagactggccatagaaaagtaagcttgaactcccaattgatgtgaccacctcttcttaattttgttcacagtaaaaacacttttttgagttattaggcttacccctagcttttgacctttgcatttcatatatgttagatgtctcagcaagaatatctggtctcccctaatttttattcccagtgccgatgttcaaaataaactttctccagtctgggaaccttttttacttccccatatttgttattatttagaatggttcatacgtctgctttgtttgcatactggtcttcagattatgagactcgatgataacagtatggtactgcttctgtgacaaatatcgtgccttaacaatgtggctgtccttttccactgaagaaggaaagacgttttgatctagaaatagcgttgtgatttccttgctgttggttttacactgccttccacattgcaacagcaagttgatttcttgtgatcccagaattttctaagaggatgagttgaatctatagcagcattgtcagtacagaccagtggttctcaaactttaaaatgcctcagcatcacttgggagcttattgaaatgcagatcccagagtcagtaaatctgcctgtgaagtatgatagtctgcatttgtaatgagcattcaagtgattctgatgcaggtgagctgggggcatacagggaggaacactgccctggactatccattgcatttttgcctctaaacaactacagaattttctagggttttaaattatgtaaaatgtttacttattctgagcttagagagaatggggagggtatttttaaattttattgttttatttctttaagtttttctttgctttaagattataggtattaggtttgtttttgtttttccacttatcttgagttcactttgatgttaaatctattgctacttcagttgtaaaaccagccaaaagtttctggatgaaggtcaagtttgaccttttaggagttattgtacataaaggcttcatccacgaaccatccagcgcacagaagcaagtgcaaaaatgacacaagcacaactctccagacgtggctccttctcctttctcagtgcagactctcactgaaagctgctattttcatcctccttgtggttgcttttcttgtttctcttccattgtacatgtgggttatataccatatgttaaatatgcaataaagtgtttacaggatgtccttctgaagggtagtcctttgtaaagctgtacagactttgcagtttaagcacaatgtgcacatgttagttttatatacagcaaaacttgattttttgcagatggaaaggtattttgtttctatacaaagtaaatggattgtttgtgcttaatgtaaagccgctttataaaactgtaaaataaagtttttttcttaaaaag

SEQ ID NO: 648 - protein, 180 aa, Homo sapiens [sequence omitted]

SEQ ID NO: 649 - DNA, 2605 bp, Homo sapiens
gcatgtccgaagccgcaaccaggtggtcctgtcaaggcagctgtcagaagacctgcttctcacgcgtgaggccctggagaaggaggtgcagctgcggcgacagctccagcaggagaaggaggagctgttgtaccgggtccttggggccaatgcctcgcctgccttccctctggcccctgtcactcccactgaggtctctttcctcgccacatagggtgcagggcctgggcccaccacgacgcctgaagtcacagctccttccaaggtttttctggagaagacagcaggagcctctcagttcttttccaggaaggaacgagggtgggagcgagatggagatcctgggtgtgtgcccagtgagccctggggccttgagttacatggaatcacccacagggttttggaggccccgagaagcgtcttcccttgagttggccaagggaataagcaagaggagacatttcctccctgccccagcactctgtcccaatccgagaagttccgaggctttcccaggggcagtctgtgtcacgctggccatttgacataaaggagacagcccctggtcccagcttgtcagctctgctgccgacttgctgacttatcaacttcctctaggtgtttccactccaccctggcctgctcagagcctcagtttacccctgcattaaaatggtggggggacgggtcaaaggactcttatgtcactgcagtgtcccattctaggattgtctgaaggccagagtaggggttggggggagtgtggacaaaccccgcaaatcagagtggggaaggtgagtggtggagagggggtctctgaaggcccttggggctgacagggccaggcagcctccccagctgaggcatcattcctgggccagagtcgtgtccaccaagggacagtagccagagctcctcttcctttaccaggcaaggtgcatcccctcagccctcctggcccttcagtcttggtgccacctgggcacaggggcaagcttggtggttgtgagtccattcatctatcagagctggaacctcatccctgcacagatgaggaaaccaaggcatggagcagttcccagagtcgaatctagatctcatctgtcatccgggtcttatcctttgctctgtttttctcttcaggctctggaaaatcagatctgtgacttaatcctctccctggccctcacccacttagtttctttttcattcctgctccctgccttaactcctcctcccactgcccctgatcccaggcccaggcttttacaacctggtgctcagcttccccatcagtgaaaaggggtggctagagtaactaacctcagcaggccgtccagtcctgatagtctgtggatttcggatccttctcaggaagcttcatgtctaatggagactataattataactcctgttctgcatagagcatttgcatcaaaggctttccatacccctccctcccctggtcctcataagatccttgaagcaggttcctattcctcattggcaacatggcaaacagatcacaggagtcaaagggccttgctcaaggtccccagcttcagccccaggccctaagccagcgtcagaacagtcaatctgcatttttcatcagtcattctatagtgacatcatcccagactgccttctgtattcccctgtgtacagtctccttctgtttctaggtttagaagttcagaggtgactgtgtttctccatttccacagccaaatgggggaagaggtgaggctaggggagtgctgtgctgattctccagccatggtcagacaggtcacccaggagcctcgaggaaagccctggagggaatcacatgtgtactttttcatgaagctttttgcaaagcacatctgtgatacactagtttattgaactaatgtccaggagtagacatgattggtggccaagttatttggggacacctaaacagatcagtgacctgaatgacttctcagaacctttaatatgccaatgtgtgtggcaaacttacaagaagggagctaagtatccagcctctcccaaacctctttgaacaaagcttctgtccctcccacacctctcacctcacaggcacatcaggctgcagaatgcgctttagaaagcattgttttagtccaggcacagtggctcacgcctgtaatcccagcactttgggaggccgaggtgggtggatcgcaaggttgggagattgagaccatcctggctaacacagtgaaaccctgtctctactaaaaaaatacaaaaaattagcttggcgtggtggtgggcgcctgtagtcccagcagcttgggaggctgaggctggagaatggtgtgaacccaggaggcggagcttgcagtgagccaagatcgcgccactgcactccagcccgggtgacagagcaagactccgtctcaaaaaaaagaaaagaaaaaagaaagcattgttttaattgagaggggcagggctggagaaggagcaagttgtggggagccaggcttccctcacgcagcctgtggtggatgtgggaaggagatcaacttctcctcactctgggacagacgatgtatggaaactaaaaagaacatgcggcaccttaaaaaaaaaa

SEQ ID NO: 650 - protein, 825 aa, Homo sapiens
MGWLCSGLLFPVSCLVLLQVASSGNMKVLQEPTCVSDYMSISTCEWKMNGPTNCSTELRLLYQLVFLLSEAHTCIPENNGGAGCVCHLLMDDVVSADNYTLDLWAGQQLLWKGSFKPSEHVKPRAPGNLTVHTNVSDTLLLTWSNPYPPDNYLYNHLTYAVNIWSENDPADFRIYNVTYLEPSLRIAASTLKSGISYRARVRAWAQCYNTTWSEWSPSTKWHNSYREPFEQHLLLGVSVSCIVILAVCLLCYVSITKIKKEWWDQIPNPARSRLVAIIIQDAQGSQWEKRSRGQEPAKCPHWKNCLTKLLPCFLEHNMKRDEDPHKAAKEMPFQGSGKSAWCPVEISKTVLWPESISVVRCVELFEAPVECEEEEEVEEEKGSFCASPESSRDDFQEGREGIVARLTESLFLDLLGEENGGFCQQDMGESCLLPPSGSTSAHMPWDEFPSAGPKEAPPWGKEQPLHLEPSPPASPTQSPDNLTCTETPLVIAGNPAYRSFSNSLSQSPCPRELGPDPLLARHLEEVEPEMPCVPQLSEPTTVPQPEPETWEQILRRNVLQHGAAAAPVSAPTSGYQEFVHAVEQGGTQASAVVGLGPPGEAGYKAFSSLLASSAVSPEKCGFGASSGEEGYKPFQDLIPGCPGDPAPVPVPLFTFGLDREPPRSPQSSHLPSSSPEHLGLEPGEKVEDMPKPPLPQEQATDPLVDSLGSGIVYSALTCHLCGHLKQCHGQEDGGQTPVMASPCCGCCCGDRSSPPTTPLRAPDPSPGGVPLEASLCPASLAPSGISEKSKSSSSFHPAPGNAQSSSQTPKIVNFVSVGPTYMRVS

SEQ ID NO: 651 - DNA, 3597 bp, Homo sapiens
ggcgaatggagcaggggcgcgcagataattaaagatttacacacagctggaagaaatcatagagaagccgggcgtggtggctcatgcctataatcccagcacttttggaggctgaggcgggcagatcacttgagatcaggagttcgagaccagcctggtgccttggcatctcccaatggggtggctttgctctgggctcctgttccctgtgagctgcctggtcctgctgcaggtggcaagctctgggaacatgaaggtcttgcaggagcccacctgcgtctccgactacatgagcatctctacttgcgagtggaagatgaatggtcccaccaattgcagcaccgagctccgcctgttgtaccagctggtttttctgctctccgaagcccacacgtgtatccctgagaacaacggaggcgcggggtgcgtgtgccacctgctcatggatgacgtggtcagtgcggataactatacactggacctgtgggctgggcagcagctgctgtggaagggctccttcaagcccagcgagcatgtgaaacccagggccccaggaaacctgacagttcacaccaatgtctccgacactctgctgctgacctggagcaacccgtatccccctgacaattacctgtataatcatctcacctatgcagtcaacatttggagtgaaaacgacccggcagatttcagaatctataacgtgacctacctagaaccctccctccgcatcgcagccagcaccctgaagtctgggatttcctacagggcacgggtgagggcctgggctcagtgctataacaccacctggagtgagtggagccccagcaccaagtggcacaactcctacagggagcccttcgagcagcacctcctgctgggcgtcagcgtttcctgcattgtcatcctggccgtctgcctgttgtgctatgtcagcatcaccaagattaagaaagaatggtgggatcagattcccaacccagcccgcagccgcctcgtggctataataatccaggatgctcaggggtcacagtgggagaagcggtcccgaggccaggaaccagccaagtgcccacactggaagaattgtcttaccaagctcttgccctgttttctggagcacaacatgaaaagggatgaagatcctcacaaggctgccaaagagatgcctttccagggctctggaaaatcagcatggtgcccagtggagatcagcaagacagtcctctggccagagagcatcagcgtggtgcgatgtgtggagttgtttgaggccccggtggagtgtgaggaggaggaggaggtagaggaagaaaaagggagcttctgtgcatcgcctgagagcagcagggatgacttccaggagggaagggagggcattgtggcccggctaacagagagcctgttcctggacctgctcggagaggagaatgggggcttttgccagcaggacatgggggagtcatgccttcttccaccttcgggaagtacgagtgctcacatgccctgggatgagttcccaagtgcagggcccaaggaggcacctccctggggcaaggagcagcctctccacctggagccaagtcctcctgccagcccgacccagagtccagacaacctgacttgcacagagacgcccctcgtcatcgcaggcaaccctgcttaccgcagcttcagcaactccctgagccagtcaccgtgtcccagagagctgggtccagacccactgctggccagacacctggaggaagtagaacccgagatgccctgtgtcccccagctctctgagccaaccactgtgccccaacctgagccagaaacctgggagcagatcctccgccgaaatgtcctccagcatggggcagctgcagcccccgtctcggcccccaccagtggctatcaggagtttgtacatgcggtggagcagggtggcacccaggccagtgcggtggtgggcttgggtcccccaggagaggctggttacaaggccttctcaagcctgcttgccagcagtgctgtgtccccagagaaatgtgggtttggggctagcagtggggaagaggggtataagcctttccaagacctcattcctggctgccctggggaccctgccccagtccctgtccccttgttcacctttggactggacagggagccacctcgcagtccgcagagctcacatctcccaagcagctccccagagcacctgggtctggagccgggggaaaaggtagaggacatgccaaagcccccacttccccaggagcaggccacagacccccttgtggacagcctgggcagtggcattgtctactcagcccttacctgccacctgtgcggccacctgaaacagtgtcatggccaggaggatggtggccagacccctgtcatggccagtccttgctgtggctgctgctgtggagacaggtcctcgccccctacaacccccctgagggccccagacccctctccaggtggggttccactggaggccagtctgtgtccggcctccctggcaccctcgggcatctcagagaagagtaaatcctcatcatccttccatcctgcccctggcaatgctcagagctcaagccagacccccaaaatcgtgaactttgtctccgtgggacccacatacatgagggtctcttaggtgcatgtcctcttgttgctgagtctgcagatgaggactagggcttatccatgcctgggaaatgccacctcctggaaggcagccaggctggcagatttccaaaagacttgaagaaccatggtatgaaggtgattggccccactgacgttggcctaacactgggctgcagagactggaccccgcccagcattgggctgggctcgccacatcccatgagagtagagggcactgggtcgccgtgccccacggcaggcccctgcaggaaaactgaggcccttgggcacctcgacttgtgaacgagttgttggctgctccctccacagcttctgcagcagactgtccctgttgtaactgcccaaggcatgttttgcccaccagatcatggcccacgtggaggcccacctgcctctgtctcactgaactagaagccgagcctagaaactaacacagccatcaagggaatgacttgggcggccttgggaaatcgatgagaaattgaacttcagggagggtggtcattgcctagaggtgctcattcatttaacagagcttccttaggttgatgctggaggcagaatcccggctgtcaaggggtgttcagttaaggggagcaacagaggacatgaaaaattgctatgactaaagcagggacaatttgctgccaaacacccatgcccagctgtatggctgggggctcctcgtatgcatggaacccccagaataaatatgctcagccaccctgtgggccgggcaatccagacagcaggcataaggcaccagttaccctgcatgttggcccagacctcaggtgctagggaaggcgggaaccttgggttgagtaatgctcgtctgtgtgttttagtttcatcacctgttatctgtgtttgctgaggagagtggaacagaaggggtggagttttgtataaataaagtttctttgtctc

SEQ ID NO: 652 - protein, 344 aa, Homo sapiens
MANYTLAPEDEYDVLIEGELESDEAEQCDKYDAQALSAQLVPSLCSAVFVIGVLDNLLVVLILVKYKGLKRVENIYLLNLAVSNLCFLLTLPFWAHAGGDPMCKILIGLYFVGLYSETFFNCLLTVQRYLVFLHKGNFFSARRRVPCGIITSVLAWVTAILATLPEYVVYKPQMEDQKYKCAFSRTPFLPADETFWKHFLTLKMNISVLVLPLFIFTFLYVQMRKTLRFREQRYSLFKLVFAIMVVFLLMWAPYNIAFFLSTFKEHFSLSDCKSSYNLDKSVHITKLIATTHCCINPLLYAFLDGTFSKYLCRCFHLRSNTPLQPRGQSAQGTSREEPDHSTEV

SEQ ID NO: 653 - DNA, 1645 bp, Homo sapiens
tcctgctctggggaagtgggcacacgttaaaagaaatgtttatttcagtcttctgaaatagggaattactctggctaaaatgtagctccagaaagggaaagtggggctgtatgaatccaggtccagtttgttgtttcctccaggataaggcagctgtcggaggggaaaatcatctcccatttctccacagggcagtctgaagatggccaattacacgctggcaccagaggatgaatatgatgtcctcatagaaggtgaactggagagcgatgaggcagagcaatgtgacaagtatgacgcccaggcactctcagcccagctggtgccatcactctgctctgctgtgtttgtgatcggtgtcctggacaatctcctggttgtgcttatcctggtaaaatataaaggactcaaacgcgtggaaaatatctatcttctaaacttggcagtttctaacttgtgtttcttgcttaccctgcccttctgggctcatgctgggggcgatcccatgtgtaaaattctcattggactgtacttcgtgggcctgtacagtgagacatttttcaattgccttctgactgtgcaaaggtacctagtgtttttgcacaagggcaactttttctcagccaggaggagggtgccctgtggcatcattacaagtgtcctggcatgggtaacagccattctggccactttgcctgaatacgtggtttataaacctcagatggaagaccagaaatacaagtgtgcatttagcagaactcccttcctgccagctgatgagacattctggaagcattttctgactttaaaaatgaacatttcggttcttgtcctccccctatttatttttacatttctctatgtgcaaatgagaaaaacactaaggttcagggagcagaggtatagccttttcaagcttgtttttgccataatggtagtcttccttctgatgtgggcgccctacaatattgcatttttcctgtccactttcaaagaacacttctccctgagtgactgcaagagcagctacaatctggacaaaagtgttcacatcactaaactcatcgccaccacccactgctgcatcaaccctctcctgtatgcgtttcttgatgggacatttagcaaatacctctgccgctgtttccatctgcgtagtaacaccccacttcaacccagggggcagtctgcacaaggcacatcgagggaagaacctgaccattccaccgaagtgtaaactagcatccaccaaatgcaagaagaataaacatggattttcatctttctgcattatttcatgtaaattttctacacatttgtatacaaaatcggatacaggaagaaaagggagaggtgagctaacatttgctaagcactgaatttgtctcaggcaccgtgcaaggctctttacaaacgtgagctccttcgcctcctaccacttgtccatagtgtggataggactagtctcatttctctgagaagaaaactaaggcgcggaaatttgtctaagatcacataactaggaagtggcagaactgattctccagccctggtagcatttgctcagagcctacgcttggtccagaacatcaaactccaaaccctggggacaaacgacatgaaataaatgtattttaaaacatct

SEQ ID NO: 654 - protein, 1234 aa, Homo sapiens
MAGAQPGVHALQLEPPTVVETLRRGSKFIKWDEETSSRNLVTLRVDPNGFFLYWTGPNMEVDTLDISSIRDTRTGRYARLPKDPKIREVLGFGGPDARLEEKLMTVVSGPDPVNTVFLNFMAVQDDTAKVWSEELFKLAMNILAQNASRNTFLRKAYTKLKLQVNQDGRIPVKNILKMFSADKKRVETALESCGLKFNRSESIRPDEFSLEIFERFLNKLCLRPDIDKILLEIGAKGKPYLTLEQLMDFINQKQRDPRLNEVLYPPLRPSQARLLIEKYEPNQQFLERDQMSMEGFSRYLGGEENGILPLEALDLSTDMTQPLSAYFINSSHNTYLTAGQLAGTSSVEMYRQALLWGCRCVELDVWKGRPPEEEPFITHGFTMTTEVPLRDVLEAIAETAFKTSPYPVILSFENHVDSAKQQAKMAEYCRSIFGDALLIEPLDKYPLAPGVPLPSPQDLMGRILVKNKKRHRPSAGGPDSAGRKRPLEQSNSALSESSAATEPSSPQLGSPSSDSCPGLSNGEEVGLEKPSLEPQKSLGDEGLNRGPYVLGPADREDEEEDEEEEEQTDPKKPTTDEGTASSEVNATEEMSTLVNYIEPVKFKSFEAARKRNKCFEMSSFVETKAMEQLTKSPMEFVEYNKQQLSRIYPKGTRVDSSNYMPQLFWNVGCQLVALNFQTLDVAMQLNAGVFEYNGRSGYLLKPEFMRRPDKSFDPFTEVIVDGIVANALRVKVISGQFLSDRKVGIYVEVDMFGLPVDTRRKYRTRTSQGNSFNPVWDEEPFDFPKVVLPTLASLRIAAFEEGGKFVGHRILPVSAIRSGYHYVCLRNEANQPLCLPALLIYTEASDYIPDDHQDYAEALINPIKHVSLMDQRARQLAALIGESEAQAGQETCQDTQSQQLGSQPSSNPTPSPLDASPRRPPGPTTSPASTSLSSPGQRDDLIASILSEVAPTPLDELRGHKALVKLRSRQERDLRELRKKHQRKAVTLTRRLLDGLAQAQAEGRCRLRPGALGGAADVEDTKEGEDEAKRYQEFQNRQVQSLLELREAQVDAEAQRRLEHLRQALQRLREVVLDANTTQFKRLKEMNEREKKELQKILDRKRHNSISEAKMRDKHKKEAELTEINRRHITESVNSIRRLEEAQKQRHDRLVAGQQQVLQQLAEEEPKLLAQLAQECQEQRARLPQEIRRSLLGEMPEGLGDGPLVACASNGHAPGSSGHLSGADSESQEENTQL

SEQ ID NO: 655 - DNA, 3705 bp, Homo sapiens
atggcgggcgcccagcccggcgtccacgcgctgcagttggagccgcccaccgtggtggagaccctgcggcgcgggagtaagttcatcaaatgggacgaggagacctccagtcggaacctggtgaccctgcgtgtggaccccaatggcttcttcttgtactggacgggccccaacatggaggtggacacactggacatcagttccatcagggacacacggacaggccggtacgcccgcctgcccaaggaccccaagatccgggaagttctgggctttgggggtcccgatgcccggctggaggagaagctgatgacggtggtgtctgggccagacccggtgaacacagtgttcttgaacttcatggccgtgcaggatgacacagccaaggtctggtctgaggagctattcaagctggctatgaacatcctggctcagaacgcctcccggaacaccttcctgcgcaaagcatacacgaagctgaagctgcaggtgaaccaggatggtcggatccccgtcaagaacatcctgaagatgttctcagcagacaagaagcgggtggagactgcgctggaatcctgtggcctcaaattcaaccggagtgagtccatccggcctgatgagttttccttggaaatctttgagcggttcctgaacaagctgtgtctgcggccggacattgacaagatcctgctggagataggcgccaagggcaagccatacctgacgctggagcagctcatggacttcatcaaccagaagcaacgcgacccgagactcaacgaagtgctgtacccgcccctgcggccctcccaggcccggctgctcatcgaaaagtatgagcccaaccagcagtttctggagcgagaccagatgtccatggagggctttagccgctacctgggaggcgaggagaatggcatcctgcccctggaagccctggatctgagcacggacatgacccagccactgagtgcctacttcatcaactcctcgcataacacctatctcactgcggggcagctggctgggacctcgtcggtggagatgtaccgccaggcactactatggggctgccgctgcgtggagctggacgtgtggaagggacggccgcctgaggaggaacccttcattacccacggcttcaccatgaccacagaggtgcctctgcgcgacgtgctggaggccattgccgagactgccttcaagacctcgccctaccccgtcatcctctccttcgagaaccatgtggactcggcaaagcaacaggcaaagatggctgagtactgccgctccatctttggagacgcgctactcatcgagcctctggacaagtacccgctggccccaggcgttcccctgcccagcccccaggacctgatgggccgtatcctggtgaagaacaagaagcggcaccgacccagcgcaggtggcccagacagcgccgggcgcaagcggcccctggagcagagcaattctgccctgagcgagagctccgcggccaccgagccctcctccccgcagctggggtctcccagctctgacagctgcccaggcctgagcaatggggaggaggtagggcttgagaagcccagcctggagcctcagaagtctctgggtgacgagggcctgaaccgaggcccctatgttcttggacctgctgaccgtgaggatgaggaggaagatgaggaagaggaggaacagacagaccccaaaaagccaactacagatgagggcacagccagcagcgaggtgaatgccactgaggagatgtccacgcttgtcaactacatcgaacctgtcaagttcaagtcctttgaggctgctcgaaagaggaacaaatgcttcgagatgtcgtcctttgtggagaccaaggccatggagcaactgaccaagagccccatggagtttgtggaatacaacaagcagcagctcagccgcatctaccccaagggcacccgcgtggactcctccaactacatgccccagctcttctggaacgtagggtgccagcttgttgcgctcaacttccagaccctcgatgtggcgatgcagctcaacgcgggcgtttttgagtacaacgggcgcagcgggtacctgctcaagccggagttcatgcggcggccggacaagtccttcgaccccttcactgaggtcatcgtggatggcatcgtggccaatgccttgcgggtcaaggtgatctcagggcagttcctgtccgacaggaaggtgggcatctacgtggaggtggacatgtttggcctccctgttgatacgcggcgcaagtaccgcacccggacctctcaggggaactcgttcaaccccgtgtgggacgaagagcccttcgacttccccaaggtggtgctgcccacgctggcttcacttcgcattgcagcctttgaggaggggggtaaattcgtagggcaccggatcctgcctgtctctgccatccgctccggataccactacgtctgcctgcggaacgaggccaaccaaccgctgtgcctgccggccctgctcatctacaccgaagcctcggactacattcctgacgaccaccaggactatgcggaggccctgatcaaccccattaagcacgtcagcctgatggaccagagggcccggcagctggccgccctcattggggagagtgaggctcaggctggccaagagacgtgccaggacacccagtctcagcagctggggtctcagccgtcctcaaaccccacccccagcccactggatgcctccccccgccggccccctggccccaccacctcccctgccagcacctccctcagcagcccagggcagcgtgatgatctcatcgccagcatcctctcagaggtggcccccaccccgctggatgagctccgaggtcacaaggctctggtcaagctccggagccggcaagagcgagacctgcgggagctgcgcaagaagcatcagcggaaggcagtcaccctcacccgccgcctgctggatggcctggctcaggcacaggctgagggcaggtgccggctgcggccaggtgccctaggtggggccgctgatgtggaggacacgaaggagggggaggacgaggcaaagcggtatcaggagttccagaacagacaggtgcagagcctgctggagctgcgggaggcccaggtggacgcagaggcccagcggaggctggaacacctgagacaggctctgcagcggctcagggaggtcgtccttgatgcaaacacaactcagttcaagaggctgaaagagatgaacgagagggagaagaaggagctgcagaagatcctggacagaaagcgccataacagcatctcggaggccaagatgagggacaagcataagaaggaggcggaactgacggagattaaccgtcggcacatcactgagtcagtcaactccatccgtcggctggaggaggcccagaagcagcggcatgaccgtcttgtggctgggcagcagcaggtcctgcaacagctggcagaagaggagcccaagctgctggcccagctggcccaggagtgtcaggagcagcgggcgaggctcccccaggagatccgccggagcctgctgggcgagatgccggaggggctgggggacgggcctctggtggcctgtgccagcaacggtcacgcacccgggagcagcgggcacctgtcgggcgctgactcggagagccaggaggagaacacgcagctctga

SEQ ID NO: 656 - protein, 330 aa, Homo sapiens
MPHSVTLRGPSPWGFRLVGGRDFSAPLTISRVHAGSKAALAALCPGDLIQAINGESTELMTHLEAQNRIKGCHDHLTLSVSRPEGRSWPSAPDDSKAQAHRIHIDPEIQDGSPTTSRRPSGTGTGPEDGRPSLGSPYGQPPRFPVPHNGSSEATLPAQMSTLHVSPPPSADPARGLPRSRDCRVDLGSEVYRMLREPAEPVAAEPKQSGSFRYLQGMLEAGEGGDWPGPGGPRNLKPTASKLGAPLSGLQGLPECTRCGHGIVGTIVKARDKLYHPECFMCSDCGLNLKQRGYFFLDERLYCESHAKARVKPPEGYDVVAVYPNAKVELV

SEQ ID NO: 657 - DNA, 2256 bp, Homo sapiens
tcagagtccggctcaggctccggctgcggctccagcccgcgatgccccattccgtgaccctgcgcgggccttcgccctggggcttccgcctggtgggcggccgggacttcagcgcgcccctcaccatctcacgggtccatgctggcagcaaggctgcattggctgccctgtgcccaggagacctgatccaggccatcaatggtgagagcacagagctcatgacacacctggaggcacagaaccgcatcaagggctgccacgatcacctcacactgtctgtgagcaggcctgagggcaggagctggcccagtgcccctgatgacagcaaggctcaggcacacaggatccacatcgatcctgagatccaggacggcagcccaacaaccagcaggcggccctcaggcaccgggactgggccagaagatggcagaccaagcctgggatctccatatggacaaccccctcgctttccagtccctcacaatggcagcagcgaggccaccctgccagcccagatgagcaccctgcatgtgtctccaccccccagcgctgacccagccagaggcctcccgcggagccgggactgcagagtcgacctgggctccgaggtgtacaggatgctgcgggagccagccgagcccgtggccgcggagcccaagcagtcaggctccttccgctacttgcagggcatgctagaggccggcgagggcggggattggcccgggcctggcggcccccggaacctcaagcccacggccagcaagctgggcgctccgctgagcggcctgcaggggctgcccgagtgcacgcgctgcggccacggcatcgtgggcaccatcgtcaaggcacgggacaagctctaccatcccgagtgcttcatgtgcagtgactgcggcctgaacctcaagcagcgtggttacttctttctggacgagcggctctactgtgagagccacgccaaggcgcgcgtgaagccgcccgagggctacgacgtggtggcggtgtaccccaatgccaaggtggaactcgtctgagctgggaccctgctcccacgcctgcttcttaaggtccctgctcggccggtgtaaatatgtttcaccctgtccctctaataaagctcctctgctccaccttgaacctgtcacctggcctgccaccctcctgcgcaggccatgcatggctcccgagtacagtagtatctgcttaggtgccaggcatgtcctaggctctgggtgcagtagtgagcaggacgggtaccatgctgccctgaaggggccacagcctgggtggaaggcagacctgaatcacaacgggccagctctagtaatacgaaggtgaggtctgggatgctgcgtgcggcgcgacgacaggaggtatgacctgggtggggtcagggaaagtcttagctgagaactaagagatgagggaggcacaaactctgcacgggggaactgtgtgtgcaaaggtgagctgggggcgagaaaggcctctgtggccgtcatcggcactagcgggttgggggtggtggtggggtgctggcagcctcaggagcgatcgctcccctggagagggtgattgagtgtggagatcaccggggccgccgcgggccgtctgcacttctgttccaggtttttctggcattttctgttccaggtttcttccacccacgagcactttattctcctccgagacccccttttcttccccttcctctctcccaccagggggcgcgcttaaatttccagacagagaccagaaggaaggtttagaaagaaaagaacacttgcccagggcagctttgccctccaagaggctccctcctgtctctaagtcaattccacccctcctcgaagtcccggcttccacccctctcctcagagtcccggcgtttacctcgtggtgtgtttgccttgggcctttcatgccccggctgcacacatcgtctgtgaattgtggctgttcactcccgaggatgtgtcctagactccgggtcgcgtggatctaccctctagtttacttgctcgggagaagaaactgactcgttttatttagtgcctatttagcgagcccagagtaacgtacatttgtgctgttttcaattttgtgctatcgcaaatcacaaaaaaactgttatcaattcacattcatcatcagcacgagacccatttccttgtgctcctgccagctcaggatattatgtttcttttttcatttttgccagtctgttaagtaaaatgtcatatgcgtttgttttaa

SEQ ID NO: 658 - protein, 351 aa, Homo sapiens
MGNAATAKKGSEVESVKEFLAKAKEDFLKKWENPTQNNAGLEDFERKKTLGTGSFGRVMLVKHKATEQYYAMKILDKQKVVKLKQIEHTLNEKRILQAVNFPFLVRLEYAFKDNSNLYMVMEYVPGGEMFSHLRRIGRFSEPHARFYAAQIVLTFEYLHSLDLIYRDLKPENLLIDHQGYIQVTDFGFAKRVKGRTWTLCGTPEYLAPEIILSKGYNKAVDWWALGVLIYEMAAGYPPFFADQPIQIYEKIVSGKVRFPSHFSSDLKDLLRNLLQVDLTKRFGNLKNGVSDIKTHKWFATTDWIAIYQRKVEAPFIPKFRGSGDTSNFDDYEEEDIRVSITEKCAKEFGEF

SEQ ID NO: 659 - DNA, 2945 bp, Homo sapiens
ccagccccccttcccttccctgaccccttcttgccatcgccccagacatggggaacgcggcgaccgccaagaaaggcagcgaggtggagagcgtgaaagagtttctagccaaagccaaagaagactttttgaaaaaatgggagaatccaactcagaataatgccggacttgaagattttgaaaggaaaaaaacccttggaacaggttcatttggaagagtcatgttggtaaaacacaaagccactgaacagtattatgccatgaagatcttagataagcagaaggttgttaaactgaagcaaatagagcatactttgaatgagaaaagaatattacaggcagtgaattttcctttccttgttcgactggagtatgcttttaaggataattctaatttatacatggttatggaatatgtccctgggggtgaaatgttttcacatctaagaagaattggaaggttcagtgagccccatgcacggttctatgcagctcagatagtgctaacattcgagtacctccattcactagacctcatctacagagatctaaaacctgaaaatctcttaattgaccatcaaggctatatccaggtcacagactttgggtttgccaaaagagttaaaggcagaacttggacattatgtggaactccagagtatttggctccagaaataattctcagcaagggctacaataaggcagtggattggtgggcattaggagtgctaatctatgaaatggcagctggctatcccccattctttgcagaccaaccaattcagatttatgaaaagattgtttctggaaaggtccgattcccatcccacttcagttcagatctcaaggaccttctacggaacctgctgcaggtggatttgaccaagagatttggaaatctaaagaatggtgtcagtgatataaaaactcacaagtggtttgccacgacagattggattgctatttaccagaggaaggttgaagctccattcataccaaagtttagaggctctggagataccagcaactttgatgactatgaagaagaagatatccgtgtctctataacagaaaaatgtgcaaaagaatttggtgaattttaaagaggaacaagatgacatctgagctcacactcagtgtttgcactctgttgagagataaggtagagctgagaccgtccttgttgaagcagttacctagttccttcattccaacgactgagtgaggtctttattgccatcatccgtgtgcgcactctgcatccacctatgtaacaaggcaccgctaagcaagcattgtctgtgccataacacagtactagaccactttcttacttctctttgggttgtctttctcctctcctacatccatttcttccttttcaatttcattggttttctctaaacagtgctccattttattttgttggtgtttcagatgggcagtgttatggctacgtgatatttgaagggaaggataagtgttgctttcagtagttattgccaatattgttgttggtcaatggcttgaagataaactttctaataattattatttctttgagtagctcagacttggttttgccaaaactcttggtaatttttgaagatagactgtcttatcaccaaggaaatttatacaaattaagactaactttcttggaattcactattctggcaataaattttggtagactaatacagtacagctagacccagaaatttggaaggctgtagatcagaggttctagttccctttccctccttttatatcctcctctccttgagtaatgaagtgaccagcctgtgtagtgtgacaaacgtgtctcattcagcaggaaaaactaatgatatggatcatcacccagattctctcacttggtaccagcatttctgtaggtattagagaagagttctaagttttctaaaccttaactgttccttaaggattttagccagtattttaatagaacatgattaatgaaagtgacaaattttaaattttctctaatagtcctcatcataaactttttaaaggaaaataagcaaactaaaaagaacattggtttagataaatacttatactttgcaaagtcaaaaatggcttgatttttggaaacaatatagaggtattcatatttaaatgagggtttacatttgttttgttttgtaaccgttaaaaagaagttgtttccagctaattattgtggtgtactatatttgtgagcctagggtaggggcactgctgcaacttctgctttcatcccatgcctcatcaatgaggaaagggaacaaagtgtataaaacctgccacaattgtattttaattttgaggtatgatattttcagatatttcataatttctaacctctgttctctcagtaaacagaatgtctgatcgatcatgcagatacaatgttggtatttgagaggttagtttttttcctacacttttttttgccaactgacttaacaacattgctgtcaggtggaaatttcaagcacttttgcacatttagttcagtgtttgttgagaatccatggcttaacccacttgttttgctatttttttctttgcttttaattttccccatctgattttatctctgcgtttcagtgacctaccttaaaacaacacacgagaagagttaaactgggttcattttaatgatcaatttacctgcatataaaatttatttttaatcaagctgatcttaatgtatataatcattctatttgctttattatcggtgcaggtaggtcattaacaccacttcttttcatctgtaccacaccctggtgaaacctttgaagacataaaaaaaacctgtctgagatgttctttctaccaatctatatgtctttcggttatcaagtgtttctgcatggtaatgtcatgtaaatgctgatattgatttcactggtccatctatatttaaaacgtgc

SEQ ID NO: 660 - protein, 201 aa, Homo sapiens
MTEKAPEPHVEEDDDDELDSKLNYKPPPQKSLKELQEMDKDDESLIKYKKTLLGDGPVVTDPKAPNVVVTRLTLVCESAPGPITMDLTGDLEALKKETIVLKEGSEYRVKIHFKVNRDIVSGLKYVQHTYRTGVKVDKATFMVGSYGPRPEEYEFLTPVEEAPKGMLARGTYHNKSFFTDDDKQDHLSWEWNLSIKKEWTE

SEQ ID NO: 661 - DNA, 1249 bp, Homo sapiens
ggcacgagccagggtttcctcttcaagtaggtctaaaacattttttttctcattgacttccttcctgttctaactgccagtactcagaagtcagagttgagagacagaggcaccccggacagagacgtgaagcactgaataaatagatcagaatgactgaaaaagccccagagccacatgtggaggaggatgacgatgatgagctggacagcaagctcaattataagcctccaccacagaagtccctgaaagagctgcaggaaatggacaaagatgatgagagtctaattaagtacaagaaaacgctgctgggagatggtcctgtggtgacagatccgaaagcccccaatgtcgttgtcacccggctcaccctggtttgtgagagtgccccgggaccaatcaccatggaccttactggagatctggaagccctcaaaaaggaaaccattgtgttaaaggaaggttctgaatatagagtcaaaattcacttcaaagtgaacagggatattgtgtcaggcctgaaatacgttcagcacacctacaggactggggtgaaagtggataaagcaacatttatggttggcagctatggacctcggcctgaggagtatgagttcctcactccagttgaggaggctcccaagggcatgctggcccgaggcacgtaccacaacaagtccttcttcaccgacgatgacaagcaagaccacctcagctgggagtggaacctgtcgattaagaaggagtggacagaatgaatgcatccaccccgttccccacccttgccacctggaagaattctctcaggcgtgttcagcaccctgtccctcctccctgtccacagctgggtccctcttcaacactgccacatttccttattgatcgatcttttcccaccctgtcactcaacgtggtccctagaacaagaggcttaaaaccgggctttcacccaacctgctccctctgatcctccatcagggccagatcttccacgtctccatctcagtacacaatcatttaatatttccctgtcttacccctattcaagcaactagaggccagaaaatgggcaaattatcactaacaggtctttgactcaggttccagtagttcattctaatgcctagattcttttgtggttgttgctggcccaatgagtccctagtcacatcccctgccagagggagttcttcttttgtgagagacactgtaaacgacacaagagaacaagaataaaacaataactgtg

SEQ ID NO: 662 - protein, 1504 aa, Homo sapiens
MATARTFGPEREAEPAKEARVVGSELVDTYTVYIIQVTDGSHEWTVKHRYSDFHDLHEKLVAERKIDKNLLPPKKIIGKNSRSLVEKREKDLEVYLQKLLAAFPGVTPRVLAHFLHFHFYEINGITAALAEELFEKGEQLLGAGEVFAIGPLQLYAVTEQLQQGKPTCASGDAKTDLGHILDFTCRLKYLKVSGTEGPFGTSNIQEQLLPFDLSIFKSLHQVEISHCDAKHIRGLVASKPTLATLSVRFSATSMKEVLVPEASEFDEWEPEGTTLEGPVTAVIPTWQALTTLDLSHNSISEIDESVKLIPKIEFLDLSHNGLLVVDNLQHLYNLVHLDLSYNKLSSLEGLHTKLGNIKTLNLAGNLLESLSGLHKLYSLVNLDLRDNRIEQMEEVRSIGSLPCLEHVSLLNNPLSIIPDYRTKVLAQFGERASEVCLDDTVTTEKELDTVEVLKAIQKAKEVKSKLSNPEKKGGEDSRLSAAPCIRPSSSPPTVAPASASLPQPILSNQGIMFVQEEALASSLSSTDSLTPEHQPIAQGCSDSLESIPAGQAASDDLRDVPGAVGGASPEHAEPEVQVVPGSGQIIFLPFTCIGYTATNQDFIQRLSTLIRQAIERQLPAWIEAANQREEGQGEQGEEEDEEEEEEEDVAENRYFEMGPPDVEEEEGGGQGEEEEEEEEDEEAEEERLALEWALGADEDFLLEHIRILKVLWCFLIHVQGSIRQFAACLVLTDFGIAVFEIPHQESRGSSQHILSSLRFVFCFPHGDLTEFGFLMPELCLVLKVRHSENTLFIISDAANLHEFHADLRSCFAPQHMAMLCSPILYGSHTSLQEFLRQLLTFYKVAGGCQERSQGCFPVYLVYSDKRMVQTAAGDYSGNIEWASCTLCSAVRRSCCAPSEAVKSAAIPYWLLLTPQHLNVIKADFNPMPNRGTHNCRNRNSFKLSRVPLSTVLLDPTRSCTQPRGAFADGHVLELLVGYRFVTAIFVLPHEKFHFLRVYNQLRASLQDLKTVVIAKTPGTGGSPQGSFADGQPAERRASNDQRPQEVPAEALAPAPVEVPAPAPAAASASGPAKTPAPAEASTSALVPEETPVEAPAPPPAEAPAQYPSEHLIQATSEENQIPSHLPACPSLRHVASLRGSAIIELFHSSIAEVENEELRHLMWSSVVFYQTPGLEVTACVLLSTKAVYFVLHDGLRRYFSEPLQDFWHQKNTDYNNSPFHISQCFVLKLSDLQSVNVGLFDQHFRLTGSTPMQVVTCLTRDSYLTHCFLQHLMVVLSSLERTPSPEPVDKDFYSEFGNKTTGKMENYELIHSSRVKFTYPSEEEIGDLTFTVAQKMAEPEKAPALSILLYVQAFQVGMPPPGCCRGPLRPKTLLLTSSEIFLLDEDCVHYPLPEFAKEPPQRDRYRLDDGRRVRDLDRVLMGYQTYPQALTLVFDDVQGHDLMGSVTLDHFGEVPGGPARASQGREVQWQVFVPSAESREKLISLLARQWEALCGRELPVELTG

SEQ ID NO: 663 - DNA, 5132 bp, Homo sapiens
gcggcggtggcggcggagacccgaacatggcgaccgcgcgcaccttcgggcccgagcgggaagccgagccggccaaggaagcgcgcgtcgtgggctcggagcttgtggacacttatacggtttacatcatccaggtcactgatggcagccatgagtggacagtaaagcaccgctacagcgacttccatgacctgcatgaaaagctcgttgcagagagaaagattgataaaaacctgcttccgcccaaaaagataattgggaaaaactcaagaagcttggtggagaagagggagaaggatctggaggtctacctccagaagctcctggctgccttccctggcgtgacccccagagtactggcccacttcttgcattttcacttctatgagataaatggcatcaccgcggcactggctgaagagctctttgagaaaggagaacagctcctgggggccggcgaggtctttgccattggacccctgcagctgtatgccgtcacggagcagctgcagcagggaaagcccacgtgcgccagtggggatgccaagaccgacctcgggcacatcctggacttcacctgtcgccttaagtaccttaaggtttctggcacagaaggaccttttgggaccagcaacattcaggagcagctcctgccgttcgacctatcaatattcaagtccctgcatcaggtggagataagtcactgtgatgctaagcacatcagagggctggtcgcatcgaagcccaccttagccacgctgagtgtccgcttctcagcaacctcgatgaaggaagtccttgttcctgaagcctcagaatttgatgagtgggagcctgaaggcacaaccctagaaggccctgtgactgccgtcatccccacttggcaggcattgaccacgcttgacctgagccacaacagcatctccgagatcgacgagtctgtgaaactgatcccaaagattgagttcctggacctgagtcacaatggattgctggttgtggacaatctgcagcacctgtataaccttgtgcatctggacctgtcctacaacaagctctcctccttggaagggcttcacaccaagctggggaacatcaagaccttaaacctggcaggcaacctcctagagagtctgagtggcctgcacaagctctactcactggtcaacctggatctccgggacaacaggatcgaacagatggaggaggtccggagcataggcagcctcccgtgtctggagcacgtgtctctgctgaacaaccctctgagcatcatccccgactaccggaccaaggtgctggctcagttcggagagagggcctcagaggtctgtctggatgacacagtgaccacagagaaggagctggacactgtggaagtgctgaaagcaattcagaaagccaaggaggtcaagtccaaactgagcaacccagagaagaagggtggtgaagactcccggctctcagctgccccctgcatcagacccagcagctcccctcccactgtggctcccgcatctgcctccctgccccagcccatcctctctaaccaaggaatcatgttcgttcaggaggaggccctggccagcagcctctcgtccactgacagtctgactcccgagcaccagcccattgcccagggatgttctgattccttggagtccatccctgcgggacaggcagcttccgatgatttaagggacgtgccaggagctgttggtggtgcaagcccagaacatgccgagccggaggtccaggtggtgccggggtctggccagatcatcttcctgcccttcacctgcattggctacacggccaccaatcaggacttcatccagcgcctgagcacactgatccggcaggccatcgagcggcagctgcctgcctggatcgaggctgccaaccagcgggaggagggccagggtgaacagggcgaggaggaggatgaggaggaggaagaagaggaggacgtggctgagaaccgctactttgaaatggggcccccagacgtggaggaggaggagggaggaggccagggggaggaagaggaggaggaagaggaggatgaagaggccgaggaggagcgcctggctctggaatgggccctgggcgcggacgaggacttcctgctggagcacatccgcatcctcaaggtgctgtggtgcttcctgatccatgtgcagggcagtatccgccagttcgccgcctgccttgtgctcaccgacttcggcatcgcagtcttcgagatcccgcaccaggagtctcggggcagcagccagcacatcctctcctccctgcgctttgtcttttgcttcccgcatggcgacctcaccgagtttggcttcctcatgccggagctgtgtctggtgctcaaggtacggcacagtgagaacacgctcttcattatctcggacgccgccaacctgcacgagttccacgcggacctgcgctcatgctttgcaccccagcacatggccatgctgtgtagccccatcctctacggcagccacaccagcctgcaggagttcctgcgccagctgctcaccttctacaaggtggctggcggctgccaggagcgcagccagggctgcttccccgtctacctggtctacagtgacaagcgcatggtgcagacggccgccggggactactcaggcaacatcgagtgggccagctgcacactctgttcagccgtgcggcgctcctgctgcgcgccctctgaggccgtcaagtccgccgccatcccctactggctgttgctcacgccccagcacctcaacgtcatcaaggccgacttcaaccccatgcccaaccgtggcacccacaactgtcgcaaccgcaacagcttcaagctcagccgtgtgccgctctccaccgtgctgctggaccccacacgcagctgtacccagcctcggggcgcctttgctgatggccacgtgctagagctgctcgtggggtaccgctttgtcactgccatcttcgtgctgccccacgagaagttccacttcctgcgcgtctacaaccagctgcgggcctcgctgcaggacctgaagactgtggtcatcgccaagacccccgggacgggaggcagcccccagggctcctttgcggatggccagcctgccgagcgcagggccagcaatgaccagcgtccccaggaggtcccagcagaggctctggccccggccccagtggaagtcccagctccagcccctgcagcagcctcagcctcaggcccagcgaagactccggccccagcagaggcctcaacttcagctttggtcccagaggagacgccagtggaagctccagccccacccccagccgaggcccctgcccagtacccgagtgagcacctcatccaggccacctcggaggagaatcagatcccctcgcacttgcctgcctgcccgtcgctccggcacgtcgccagcctgcggggcagcgccatcatcgagctcttccacagcagcattgctgaggttgaaaacgaggagctgaggcacctcatgtggtcctcggtggtgttctaccagaccccagggctggaggtgactgcctgcgtgctgctctccaccaaggctgtgtactttgtgctccacgacggcctccgccgctacttctcagagccactgcaggatttctggcatcagaaaaacaccgactacaacaacagccctttccacatctcccagtgcttcgtgctaaagcttagtgacctgcagtcagtcaatgtggggcttttcgaccagcatttccggctgacgggttccaccccgatgcaggtggtcacgtgcttgacgcgggacagctacctgacgcactgcttcctccagcacctcatggtcgtgctgtcctctctggaacgcacgccctcgccggagcctgttgacaaggacttctactccgagtttgggaacaagaccacagggaagatggagaactacgagctgatccactctagtcgcgtcaagtttacctaccccagtgaggaggagattggggacctgacgttcactgtggcccaaaagatggctgagccagagaaggccccagccctcagcatcctgctgtacgtgcaggccttccaggtgggcatgccaccccctgggtgctgcaggggccccctgcgccccaagacactcctgctcaccagctccgagatcttcctcctggatgaggactgtgtccactacccactgcccgagtttgccaaagagccgccgcagagagacaggtaccggctggacgatggccgccgcgtccgggacctggaccgagtgctcatgggctaccagacctacccgcaggccctcaccctcgtcttcgatgacgtgcaaggtcatgacctcatgggcagtgtcaccctggaccactttggggaggtgccaggtggcccggctagagccagccagggccgtgaagtccagtggcaggtgtttgtccccagtgctgagagcagagagaagctcatctcgctgttggctcgccagtgggaggccctgtgtggccgtgagctgcctgtcgagctcaccggctagcccaggccacagccagcctgtcgtgtccagcctgacgcctactggggcagggcagcaggcttttgtgttctctaaaaatgttttatcctccctttggtaccttaatttgactgtcctcgcagagaatgtgaacatgtgtgtgtgttgtgttaattctttctcatgttgggagtgagaatgccgggcccctcagggctgtcggtgtgctgtcagcctcccacaggtggtacagccgtgcacaccagtgtcgtgtctgctgttgtgggaccgttgttaacacgtgacactgtgggtctgactttctcttctacacgtcctttcctgaagtgtcgagtccagtcctttgttgctgttgctgttgctgttgctgttgctgttggcatcttgctgctaatcctgaggctggtagcagaatgcacattggaagctcccaccccatattgttcttcaaagtggaggtctcccctgatccagacaagtgggagagcccgtgggggcaggggacctggagctgccagcaccaagcgtgattcctgctgcctgtattctctattccaataaagcagagtttgacaccgtcttaaaaaaaaa

SEQ ID NO: 664 - protein, 417 aa, Homo sapiens
MARAMAAAWPLLLVALLVLSWPPPGTGDVVVQAPTQVPGFLGDSVTLPCYLQVPNMEVTHVSQLTWARHGESGSMAVFHQTQGPSYSESKRLEFVAARLGAELRNASLRMFGLRVEDEGNYTCLFVTFPQGSRSVDIWLRVLAKPQNTAEVQKVQLTGEPVPMARCVSTGGRPPAQITWHSDLGGMPNTSQVPGFLSGTVTVTSLWILVPSSQVDGKNVTCKVEHESFEKPQLLTVNLTVYYPPEVSISGYDNNWYLGQNEATLTCDARSNPEPTGYNWSTTMGPLPPFAVAQGAQLLIRPVDKPINTTLICNVTNALGARQAELTVQVKEGPPSEHSGMSRNAIIFLVLGILVFLILLGIGIYFYWSKCSREVLWHCHLCPSSTEHASASANGHVSYSAVSRENSSSQDPQTEGTR

SEQ ID NO: 665 - DNA, 3215 bp, Homo sapiens
cttgaagaagtgggtattccccttcccaccccaggcactggaggagcggccccccggggattccaggacctgagctccgggagctggactcgcagcgaccgcggcagagcgagctggcgccgggaagcgaggagacgcccgcgggaggcccagctgctcggagcaactggcatggcccgagccatggccgccgcgtggccgctgctgctggtggcgctactggtgctgtcctggccacccccaggaaccggggacgtcgtcgtgcaggcgcccacccaggtgcccggcttcttgggcgactccgtgacgctgccctgctacctacaggtgcccaacatggaggtgacgcatgtgtcacagctgacttgggcgcggcatggtgaatctggcagcatggccgtcttccaccaaacgcagggccccagctattcggagtccaaacggctggaattcgtggcagccagactgggcgcggagctgcggaatgcctcgctgaggatgttcgggttgcgcgtagaggatgaaggcaactacacctgcctgttcgtcacgttcccgcagggcagcaggagcgtggatatctggctccgagtgcttgccaagccccagaacacagctgaggttcagaaggtccagctcactggagagccagtgcccatggcccgctgcgtctccacagggggtcgcccgccagcccaaatcacctggcactcagacctgggcgggatgcccaatacgagccaggtgccagggttcctgtctggcacagtcactgtcaccagcctctggatattggtgccctcaagccaggtggacggcaagaatgtgacctgcaaggtggagcacgagagctttgagaagcctcagctgctgactgtgaacctcaccgtgtactaccccccagaggtatccatctctggctatgataacaactggtaccttggccagaatgaggccaccctgacctgcgatgctcgcagcaacccagagcccacaggctataattggagcacgaccatgggtcccctgccaccctttgctgtggcccagggcgcccagctcctgatccgtcctgtggacaaaccaatcaacacaactttaatctgcaacgtcaccaatgccctaggagctcgccaggcagaactgaccgtccaggtcaaagagggacctcccagtgagcactcaggcatgtcccgtaacgccatcatcttcctggttctgggaatcctggtttttctgatcctgctggggatcgggatttatttctattggtccaaatgttcccgtgaggtcctttggcactgtcatctgtgtccctcgagtacagagcatgccagcgcctcagctaatgggcatgtctcctattcagctgtgagcagagagaacagctcttcccaggatccacagacagagggcacaaggtgacagcgtcgggactgagaggggagagagactggagctggcaaggacgtgggcctccagagttggacccgaccccaatggatgaagaccccctccaaagagaccagcctccctccctgtgccagacctcaaaacgacgggggcaggtgcaagttcataggtctccaagaccaccctcctttcatttgctagaaggactcactagactcaggaaagctgttaggctcacagttacagtttattacagtaaaaggacagagattaagatcagcaaagggaggaggtgcacagcacacgttccacgacagatgaggcgacggcttccatctgccctctcccagtggagccatataggcagcacctgattctcacagcaacatgtgacaacatgcaagaagtactgccaatactgccaaccagagcagctcactcgagatctttgtgtccagagttttttgtttgtcttgagacagggtctggctctgttggcagactagagtacagtggtgagatcacagttcattgcagccttgacttctcaacgccaagtcatcctcccacctcagcctcctgagtagctatgactacaggtatgtgccaccacgtctggctaatctttttattatttgtaaagtcgaggtttccctgtgttgcccaggctggtcttgaactcttggctccaagtgatacttctgccttggcctcccaaagtgctgaattaagcagctcaccatccacacggctgacctcatacatcaagccaataccgtgtggcccaagacccccaccataaatcacatcattagcatgaaccacccagagtggcccaagactcccagatcagctaccaggcaggatattccaagggcttagagatgaatgcccaggagctgaggataaagggcccgatctttctttgggcaaggttaagcctttactgcatagcagaccacacagaagggtgtgggccaccagagaattttggtaaaaatttggcctctggccttgagcttctaaatctctgtatccgtcagatctctgtggttacaagaaacagccactgaccctggtcaccagaggctgcaattcaggccgcaagcagctgcctagggggtgtccaaggagcagagaaaactactagatgtgaacttgaagaaggttgtcagctgcagccactttctgccagcatctgcagccactttctgccagcatctgcagccagcaagctgggactggcaggaaataacccacaaaagaagcaaatgcaatttccaacacaagggggaagggatgcagggggaggcagcgctgcagttgctcaggacacgctcctataggaccaagatggatgcgacccaagacccaggaggcccagctgctcagtgcaactgacaagttaaaaaggtctatgatcttgagggcagacagcagaattcctcttataaagaaaactgtttgggaaaatacgttgagggagagaagaccttgggccaagatgctaaatgggaatgcaaagcttgagctgctctgcaagagaaaataagcaggacagaggatttgctctggacagagatggaagagccgggaacagagaagtgtggggaagagataggaaccagcaggatggcaggggcaaagggctcaagggtgaggaggccagtgggaccccacagagttggggagataaaggaacattggttgctttggtggcacgtaagctccttgtctgtctccagcacccagaatctcattaaagcttatttattgtacctccaaaaaaaaaaaaaaaaaaa

SEQ ID NO: 666 - protein, 156 aa, Homo sapiens
MCHSRSCHPTMTILQAPTPAPSTIPGPRRGSGPEIFTFDPLPEPAAAPAGRPSASRGHRKRSRRVLYPRVVRRQLPVEEPNPAKRLLFLLLTIVFCQILMAEEGVPAPLPPEDAPNAASLAPTPVSPVLEPFNLTSEPSDYALDLSTFLQQHPAAF

SEQ ID NO: 667 - DNA, 1236 bp, Homo sapiens
acttggccttacactccgctcggctcaccatgtgtcactctcgcagctgccacccgaccatgaccatcctgcaggccccgaccccggccccctccaccatcccgggaccccggcggggctccggtcctgagatcttcaccttcgaccctctcccggagcccgcagcggcccctgccgggcgccccagcgcctctcgcgggcaccgaaagcgcagccgcagggttctctaccctcgagtggtccggcgccagctgccagtcgaggaaccgaacccagccaaaaggcttctctttctgctgctcaccatcgtcttctgccagatcctgatggctgaagagggtgtgccggcgcccctgcctccagaggacgcccctaacgccgcatccctggcgcccacccctgtgtcccccgtcctcgagccctttaatctgacttcggagccctcggactacgctctggacctcagcactttcctccagcaacacccggccgccttctaactgtgactccccgcactccccaaaaagaatccgaaaaaccacaaagaaacaccaggcgtacctggtgcgcgagagcgtatccccaactgggacttccgaggcaacttgaactcagaacactacagcggagacgccacccggtgcttgaggcgggaccgaggcgcacagagaccgaggcgcatagagaccgaggcacagcccagctggggctaggcccggtgggaaggagagcgtcgttaatttatttcttattgctcctaattaatatttatatgtatttatgtacgtcctcctaggtgatggagatgtgtacgtaatatttattttaacttatgcaagggtgtgagatgttccccctgctgtaaatgcaggtctcttggtatttattgagctttgtgggactggtggaagcaggacacctggaactgcggcaaagtaggagaagaaatggggaggactcgggtgggggaggacgtcccggctgggatgaagtctggtggtgggtcgtaagtttaggaggtgactgcatcctccagcatctcaactccgtctgtctactgtgtgagacttcggcggaccattaggaatgagatccgtgagatccttccatcttcttgaagtcgcctttagggtggctacgaggtagaggggtgggggttggtgggctgtcacggagcgactgtcgagatcgcctagtatgttctgtgaacacaaataaaattgatttactgtctgc

SEQ ID NO: 668 - protein, 61 aa, Homo sapiens
MDPNCSCAAGDSCTCAGSCKCKECKCTSCKKSCCSCCPVGCAKCAQGCICKGASDKCSCCA

SEQ ID NO: 669 - DNA, 186 bp, Homo sapiens
atggatcccaactgctcctgcgccgccggtgactcctgcacctgcgccggctcctgcaaatgcaaagagtgcaaatgcacctcctgcaagaaaagctgctgctcctgctgccctgtgggctgtgccaagtgtgcccagggctgcatctgcaaaggggcgtcggacaagtgcagctgctgcgcctga

SEQ ID NO: 670 - protein, 284 aa, Homo sapiens
MDAIKKKMQMLKLDKENALDRAEQAEADKKAAEDRSKQLEDELVSLQKKLKGTEDELDKYSEALKDAQEKLELAEKKATDAEADVASLNRRIQLVEEELDRAQERLATALQKLEEAEKAADESERGMKVIESRAQKDEEKMEIQEIQLKEAKHIAEDADRKYEEVARKLVIIESDLERAEERAELSEGQVRQLEEQLRIMDQTLKALMAAEDKYSQKEDRYEEEIKVLSDKLKEAETRAEFAERSVTKLEKSIDDLEDELYAQKLKYKAISEELDHALNDMTSM

SEQ ID NO: 671 - DNA, 1256 bp, Homo sapiens
gaggaatgcggtcgcccccttgggaaagtacatatctgggagaagcaggcggctccgcgctcgcactcccgctcctccgcccgaccgcgcgctcgccccgccgctcctgctgcagccccagggcccctcgccgccgccaccatggacgccatcaagaagaagatgcagatgctgaagctcgacaaggagaacgccttggatcgagctgagcaggcggaggccgacaagaaggcggcggaagacaggagcaagcagctggaagatgagctggtgtcactgcaaaagaaactcaagggcaccgaagatgaactggacaaatattctgaggctctcaaagatgcccaggagaagctggagctggcagagaaaaaggccaccgatgctgaagccgacgtagcttctctgaacagacgcatccagctggttgaggaagagttggatcgtgcccaggagcgtctggcaacagctttgcagaagctggaggaagctgagaaggcagcagatgagagtgagagaggcatgaaagtcattgagagtcgagcccaaaaagatgaagaaaaaatggaaattcaggagatccaactgaaagaggcaaagcacattgctgaagatgccgaccgcaaatatgaagaggtggcccgtaagctggtcatcattgagagcgacctggaacgtgcagaggagcgggctgagctctcagaaggccaagtccgacagctggaagaacaattaagaataatggatcagaccttgaaagcattaatggctgcagaggataagtactcgcagaaggaagacagatatgaggaagagatcaaggtcctttccgacaagctgaaggaggctgagactcgggctgagtttgcggagaggtcagtaactaaattggagaaaagcattgatgacttagaagacgagctgtacgctcagaaactgaagtacaaagccatcagcgaggagctggaccacgctctcaacgatatgacttccatgtaaacgttcatccactctgcctgcttacaccctgccctcatgctaatataagtttctttgcttcacttctcccaagactccctcgtcgagctggatgtcccacctctctgagctctgcatttgtctattctccagctgaccctggttctctctcttagcatcctgccttagagccaggcacacactgtgctttctattgtacagaagctcttcgtttcagtgtcaaataaacactgtgtaagctaaaaaaaaaaaaaaaaaaa

SEQ ID NO: 672 - protein, 370 aa, Homo sapiens
MAFRRRTKSYPLFSQEFVIHNHADIGFCLVLCVLIGLMFEVTAKTAFLFILPQYNISVPTADSETVHYHYGPKDLVTILFYIFITIILHAVVQEYILDKISKRLHLSKVKHSKFNESGQLVVFHFTSVIWCFYVVVTEGYLTNPRSLWEDYPHVHLPFQVKFFYLCQLAYWLHALPELYFQKVRKEEIPRQLQYICLYLVHIAGAYLLNLSRLGLILLLLQYSTEFLFHTARLFYFADENNEKLFSAWAAVFGVTRLFILTLAVLAIGFGLARMENQAFDPEKGNFNTLFCRLCVLLLVCAAQAWLMWRFIHSQLRHWREYWNEQSAKRRVPATPRLPARLIKRESGYHENGVVKAENGTSPRTKKLKSP

SEQ ID NO: 673 - DNA, 6974 bp, Homo sapiens
cggtgctggagaagtttgcgctgcggttcgtgagcgcagggtgcgggccccgccggccgctgcgcgcccgctgccatggctttccgcaggaggacgaaaagttacccgctcttcagccaggagttcgtcatccacaaccatgcggacatcggcttctgcctggtgctctgcgtcctcatcgggcttatgttcgaggtcacagccaagactgcctttctatttattttacctcagtataacattagcgtgcctacagcagacagtgagaccgtgcactaccactatggccctaaggacctggtcacaatcttgttctacatcttcatcaccatcatcttgcatgctgtggttcaggagtacattttagataaaatcagcaaacggcttcatctctccaaagtcaaacacagcaagttcaatgaatctggacagctggtcgtctttcatttcacctcggtgatttggtgcttctacgtggtggtgacggaaggatacttaacaaacccaagaagcctctgggaagactacccgcatgtgcacctccccttccaggtgaagtttttctacctatgccagctggcctactggctgcacgcacttcctgagctatacttccagaaggtacggaaggaggaaattccccgccagctccagtatatttgcctgtacctggtgcatatagctggagcatacctcttaaacctgagccgcctgggcctgatcttgctgctgctgcagtactcaactgagttcctcttccacacggctagactcttctactttgcagatgaaaacaacgagaaactgttcagtgcctgggctgctgtttttggggttacccgcctcttcatcctcacccttgccgtgctggccattggctttggactggctcgcatggaaaaccaggcatttgatcccgagaaagggaacttcaacactttgttttgcaggctctgcgtgctgctgctggtgtgtgccgcccaggcctggctcatgtggcgcttcatccactcccagctgcggcactggcgggaatactggaatgagcagagtgcaaagcggagagtcccagccacacccagactaccagccaggctcatcaagagggaatctggttaccatgaaaatggagtggtgaaggcagagaacggaacctccccacggactaagaaactcaagtctccctaaggccaaagtgctaagaacaggaatcctcttggtgggggccgagcagggggcaaggagcccaggccccctccctgcctcctccttcctgcctgtgatgctccgtctcaaacagccgaaacctgtcttgcaatggggggagggggcgtttcgctttccttcttcttggcttcctcttattcttccacaaaccattctcaataaagccaaaaatctttctctttctccccctcaggccacctcctgtcctcactcctgtcctgtgctggcttttctggaacgccaggcgcccatggctggcacctttctgcttgctctgtttcttgccttatggctgctgcttttcctttttacttcctattttcaccttatcttgcaatttttctgtctgatttttacaatgggaggggagctaagattgcagtcctgtccttcggtcccccagggcctgccggtcagaagcctggggctggtaggcccttggtggtcctcatgtggatgggcaagaagagagcggccatctcggatcataatctccttggtgctgattaactgacgagatatatgattccagttctgcatgtaccatcttgaggcacagcagccactgctcgttgtaaatgccaaggcatttggctttgggacgtgacaactcaatccagaaggatggtgtgaactcggttgggtcccgtgactcgagctcctaccagtggctggccgcggattggaagccagcctgctgtcgctctgtggggaggacatgtcttcccactgcttagagcgagagcagagcaaactgcgcagcaggcacctccagaaaggtaatggtggcagaacccacagtggagtcgacctaggcctttctccagcagtcccagtcgccattgctttttcagccattcacaagcattcaaaaccaaaccaaacagcagttcatatacctgcctgagataggctggtcctcacctccagagccagccagccccgtcaggggccaaacttactaccttgacttcatctctagctgcagaaacactaagtctcaagggcttcagccccatgctggtcccttggtgttcagggagggtcacttggaccgctgttcatctggccgcccttgttgagtgttctttggaattgtcgttttttgagcacaactacagcattttagactgcatgaaaccatgactgactgagagtcactctctgggtagatgataggcgcctttctggccccttccctcacagattctttcccctcccctccacctgaagagaaggcctccaagtccttttggtgccttgtgaggacttttagaaggggcgttcagctttaaaaagccggtcctaattacggccggacgcagtagcttacgcctgttatcccagcactttgggaggtcgaggtgggcagatcacctgaggttaggagttcaagaccagcctggccaacatggtgaaaccccatctctactaaaaatacaaaaaattaggtgtagtggcaggcacctgtaatcccagctactcgggaggctgaggcaggagaatcgcttgaacctagaaggtggaggttgcagtgagcggagattgtaccatggcactccagcctggacaacaagagcgaaattctgtctaaaaaaacaaaagtcccaattaagaacctccgaactctgttttgaggcaaaggggagtagttcttggtaggtgcaggaatagtagtgtcatttggaatactggtcatctttctgacatcacagtagaaaccaaaccttggatttagattcaaaaggggggaaatgggtcttttcatcaaggcaactccccttctccaagtcacttacatcatagataaattttagcttcccagtaactgagggatttgtttcctaacgccattggaggccttcatccctctctacgataaggttgcagaaatgggaagagctacccgtggttgcttttgattacccttaggaagtgagacagtgtttttgaaaatatgtatttctcccatttctccctctccttccctgacacttctctgggctgcacagcagaaacgttggtaaaagggcagtttggtttcaacacagcagacctgatatgggatcccttagccactttagtcaaacagccctgacagagtctataattgagttcaggccccccaccttgcctaataactgcaaatcgcatgttcagccagcagcctcctaagcccaccttcctcccccattagagaacacccatcctaggtgctctccaggctgtgtcattggcagggcttcacatgcaggaggcctctctcaggtgagtccaggttaaactgttgagttgtggcttcaacagatatgtatggcatgctgggatgtgccaggtgcctgcgttgtgccagttgctggagaggtagtgtgagcagagcagctgaaatcttgccatcaagcaaccctcattctcatgcctgtaggtttccattgctctgtcccaggacacttgcgtgccagagacgccacaacttcatgtccctgtctcttgcaagctccccgtgctgccagtacttcatgccttggatgtggtcccaccagcccagtggctggggtcagcttaggctctgcttcccagtggacgggtgtgctaagggtttattttatgtaaaaaaaaaaaaaaaacaaaaaaaaaccctgagaccatgagtggggctggcatcttgccagcctgggcttcagggatgtttggggggggtggttagagggtagttgtagggtactttgtcacccccctccccctgccaccctccctggcacgtttatttcacagcagagccaagtctgtggcaggttgacacagactgtgttgccagagctgaaataattccacttcatcctatgagcgtgttgggctagcttgttctaattttggccactttggctgttttcttcagttttatgcattctctcctgccccaaagtgccaagccatttgtgaaggctctgccagacacctccaagcttgagagctcagcaccatgcaccaagagcaggagaaaagacgtaaacctaccccagcaactgtggcctctcgacagccctggctaactaacttacatttgtggggaagccaacagacacagcaggaggagagggaggtggcgctggtggaccaaggatctgtgctacccgctcccctccttggaggtgcagtgatgatgggagttatttttaccatccgggcgctgatagctgcactattaataaattgcatgtgttccttttgaaggtaggggatggttctgggtgagaggggagcaggctgagccggcgggggatctgctgtcctcccttttgagtcagttctaatcccatgtgtgtctgggccaccagaccgaaatggttgctgagaaacttgtctgttcatgtcccaaggcataacttcccaacatttaagaaaccccaatagacacctctgccctggccacgttcacagatccttctcttgaccggaaaccctgggaccctaagaacccctgaagcttggggtgggtgtgtgcttctggggtctcttttgggacctcctttgtcagtaccccttcttttttctaagcagctaataagaggttgggtgaaagagtgcatctcctcccaggattccacaacaaaattcttatcttccatggatgctttaattggaagtgggttgccgacccccttgtgcctagaaaaggcctttgcttgggtttcctttgtatgcttcagccttcctagttggtttttctaggcctggtgtgagaggtagggaagtctgcacataactaattcttttgcttaagggcctatggcacaagtgcacaaacttcaattcttgatgttctaagctctctcctctaacagagggagtgctgaaagcttttgagtcaagacaatggagtgctcttcctccctcactctgccttccgagcttatggttccttttctcaggagaggattttcaggattattggaggattaggtcattgtcagatgactggaaaacctaaataggatctctctccagctcaaggttgtcccagtgaggaagactttaccaacttctcactctaccccactactcacatgagtgttagctccaccttgcaaaggctgaagaccagttctccccagtgaaagctgcctcattcttttatggagttccctggagtggcagagctataaagacgagcattgggatttgcagtctccatgtagcctttcgtgcttggcaacccctgtagactttttgtcccaagcagattgcgtgcgtgcgcctgtgtgtgagaataagtgccttactttgctgtgtggttttcaacttgtactccgtggccagcccccagttgccagggctcgacggcagccaaggacaccatacctcagtatagttatatataaaatggacacggattgtgacagtttcaccccatttgtttctaaccccgctgcccaggattagggtctgtggtgtgttctgttttgtttttggtttctcccttgtgtcagttctcttctggcccagctgggtggctgtggaagtctgtgaggtggcccaaccacaagcatacctattaagagaagcccagagcttccagcccccacttcgaaaactctcctctggccccacatagcaaactccttctccgttattttccccacccccagattttttttaaaaggcccacttgccataacctcttttggtctattttgcttcccattcagcccaaagtttatatgataaaggtgtttacttttacttcccagtctccaagtgctaacacataaacacatacatgtctgactgttgcagaactgttcgagctcctaattcagtgttaccttgttttagtcgcagcaaccctctcccctaccccttgcccgcccacgtttttctcactcttccgggttgtgcaataactctcccagccagtggtcctttccacagcctttctgtcccttaaaacacctgcaactgggggagaaatgggacccatgggagggggagtcatcatcccttacacaagaaatagccactttccttttgttgtcattcttgtgatcctgggtgggtttctgtggcactcttttagaacatgtagcatcatcttagaggtctatttttaaaaaatgtgttgaagaggaaaaaaccattctcacgatggggcttaagtcattgtccaggaataagattggcgtggtgcccatgacatcaccgtcactctgcctaaaagcactctagagctacttgttcacgtggagaggaaggatattttgcgaagcaacagccgcaggtggagagccctgttcacctgatagggtctagctgtgacagtaaatataataccgctgtttccttgggtacagatttgagtgttcatgtgatgagactgtaaacctcatttttcggttcctctgtttaaaaaaacatctgaaggatgaactaaggctgctggtgccctgagcaactgataatgcaaatgtggacaaagtgtctgttttctactctagcctgttcatatggaccaaatttcaacaaggaactcaaggaaaatttgtacctgccgtatttatgctttcatgtaaaaaagggttggggggaggggtgtctttttgcttttggtgaactttttttcaaaatcatttttccactgtttctgtctggttttaaaacaaattacagttttgtatggattttttaaatgtacattttggaacaaatgatcaaatattttctgaaataacaataaaaggcagaaaatt

SEQ ID NO: 674 - protein, 748 aa, Homo sapiens
MSNPGGRRNGPVKLRLTVLCAKNLVKKDFFRLPDPFAKVVVDGSGQCHSTDTVKNTLDPKWNQHYDLYIGKSDSVTISVWNHKKIHKKQGAGFLGCVRLLSNAINRLKDTGYQRLDLCKLGPNDNDTVRGQIVVSLQSRDRIGTGGQVVDCSRLFDNDLPDGWEERRTASGRIQYLNHITRTTQWERPTRPASEYSSPGRPLSCFVDENTPISGTNGATCGQSSDPRLAERRVRSQRHRNYMSRTHLHTPPDLPEGYEQRTTQQGQVYFLHTQTGVSTWHDPRVPRDLSNINCEELGPLPPGWEIRNTATGRVYFVDHNNRTTQFTDPRLSANLHLVLNRQNQLKDQQQQQVVSLCPDDTECLTVPRYKRDLVQKLKILRQELSQQQPQAGHCRIEVSREEIFEESYRQVMKMRPKDLWKRLMIKFRGEEGLDYGGVAREWLYLLSHEMLNPYYGLFQYSRDDIYTLQINPDSAVNPEHLSYFHFVGRIMGMAVFHGHYIDGGFTLPFYKQLLGKSITLDDMELVDPDLHNSLVWILENDITGVLDHTFCVEHNAYGEIIQHELKPNGKSIPVNEENKKEYVRLYVNWRFLRGIEAQFLALQKGFNEVIPQHLLKTFDEKELELIICGLGKIDVNDWKVNTRLKHCTPDSNIVKWFWKAVEFFDEERRARLLQFVTGSSRVPLQGFKALQGAAGPRLFTIHQIDACTNNLPKAHTCFNRIDIPPYESYEKLYEKLLTAIEETCGFAVE

SEQ ID NO: 675 - DNA, 2916 bp, Homo sapiens
  misc_feature (2534)..(2534): n = a, c, g, or t
  misc_feature (2536)..(2536): n = a, c, g, or t
ggggagctcggcgtcccgctccctccgcggctcatggcgacgactctcggcacatccgggaccctccggccgtggcggccgaggcgccggctgctcgggccccagccccggccgctgtggtgactccgccgcgcctcgccgtcgcccccgtgccgcccgccgcccccgccgcccccgccgccggggacatgtctaaccccggaggccggaggaacgggcccgtcaagctgcgcctgacagtactctgtgcaaaaaacctggtgaaaaaggattttttccgacttcctgatccatttgctaaggtggtggttgatggatctgggcaatgccattctacagatactgtgaagaatacgcttgatccaaagtggaatcagcattatgacctgtatattggaaagtctgattcagttacgatcagtgtatggaatcacaagaagatccataagaaacaaggtgctggatttctcggttgtgttcgtcttctttccaatgccatcaaccgcctcaaagacactggttatcagaggttggatttatgcaaactcgggccaaatgacaatgatacagttagaggacagatagtagtaagtcttcagtccagagaccgaataggcacaggaggacaagttgtggactgcagtcgtttatttgataacgatttaccagacggctgggaagaaaggagaaccgcctctggaagaatccagtatctaaaccatataacaagaactacgcaatgggagcgcccaacacgaccggcatccgaatattctagccctggcagacctcttagctgctttgttgatgagaacactccaattagtggaacaaatggtgcaacatgtggacagtcttcagatcccaggctggcagagaggagagtcaggtcacaacgacatagaaattacatgagcagaacacatttacatactcctccagacctaccagaaggctatgaacagaggacaacgcaacaaggccaggtgtatttcttacatacacagactggtgtgagcacatggcatgatccaagagtgcccagggatcttagcaacatcaattgtgaagagcttggtccattgcctcctggatgggagatccgtaatacggcaacaggcagagtttatttcgttgaccataacaacagaacaacacaatttacagatcctcggctgtctgctaacttgcatttagttttaaatcggcagaaccaattgaaagaccaacagcaacagcaagtggtatcgttatgtcctgatgacacagaatgcctgacagtcccaaggtacaagcgagacctggttcagaaactaaaaattttgcggcaagaactttcccaacaacagcctcaggcaggtcattgccgcattgaggtttccagggaagagatttttgaggaatcatatcgacaggtcatgaaaatgagaccaaaagatctctggaagcgattaatgataaaatttcgtggagaagaaggccttgactatggaggcgttgccagggaatggttgtatctcttgtcacatgaaatgttgaatccatactatggcctcttccagtattcaagagatgatatttatacattgcagatcaatcctgattctgcagttaatccggaacatttatcctatttccactttgttggacgaataatgggaatggctgtgtttcatggacattatattgatggtggtttcacattgcctttttataagcaattgcttgggaagtcaattaccttggatgacatggagttagtagatccggatcttcacaacagtttagtgtggatacttgagaatgatattacaggtgttttggaccataccttctgtgttgaacataatgcatatggtgaaattattcagcatgaacttaaaccaaatggcaaaagtatccctgttaatgaagaaaataaaaaagaatatgtcaggctctatgtgaactggagatttttacgaggcattgaggctcaattcttggctctgcagaaaggatttaatgaagtaattccacaacatctgctgaagacatttgatgagaaggagttagagctcattatttgtggacttggaaagatagatgttaatgactggaaggtaaacacccggttaaaacactgtacaccagacagcaacattgtcaaatggttctggaaagctgtggagttttttgatgaagagcgacgagcaagattgcttcagtttgtgacaggatcctctcgagtgcctctgcagggcttcaaagcattgcaaggtgctgcaggcccgagactctttaccatacaccagattgatgcctgcactaacaacctgccgaaagcccacacttgcttcaatcgaatagacattccaccctatgaaagctatgaaaagctatatgaaaagctgctaacagccattgaagaaacatgtggatttgctgtggaatgacaagcttcaaggatttacccaggactctatttatacaaccctgactgacagcctcctttcagcagagtttcaaagaatatgctgaaatacaggaaaacncncccccccccccccttttttttttttttttacattttaggacactgtgaggggaaaggacaattttgaaattccttttcaaggaaaaaaaggtctttatgctttgccatgaggccacattcagctgctatttaaacttaatatcttgaacctaaagaatgctgacttttcctacatttccagagttaggcagtattctacacttaaagactactactatttttataaaaggtaatctattcaaatttcttcacagatttcaagtctctcaaacatcaagacaacttcagcagtcggtacaagtcacatttcattttgattgaatacatgatcttgaacagctcctgtacttgctctttgtaaaaaaaaataaaattatttt

SEQ ID NO: 676 - protein, 493 aa, Homo sapiens
MLKALFLTMLTLALVKSQDTEETITYTQCTDGYEWDPVRQQCKDIDECDIVPDACKGGMKCVNHYGGYLCLPKTAQIIVNNEQPQQETQPAEGTSGATTGVVAASSMATSGVLPGGGFVASAAAVAGPEMQTGRNNFVIRRNPADPQRIPSNPSHRIQCAAGYEQSEHNVCQDIDECTAGTHNCRADQVCINLRGSFACQCPPGYQKRGEQCVDIDECTIPPYCHQRCVNTPGSFYCQCSPGFQLAANNYTCVDINECDASNQCAQQCYNILGSFICQCNQGYELSSDRLNCEDIDECRTSSYLCQYQCVNEPGKFSCMCPQGYQVVRSRTCQDINECETTNECREDEMCWNYHGGFRCYPRNPCQDPYILTPENRCVCPVSNAMCRELPQSIVYKYMSIRSDRSVPSDIFQIQATTIYANTINTFRIKSGNENGEFYLRQTSPVSAMLVLVKSLSGPREHIVDLEMLTVSSIGTFRTSSVLRLTIIVGPFSF

SEQ ID NO: 677 - DNA, 2742 bp, Homo sapiens
ctagtattctactagaactggaagattgctctccgagttttttttttgttattttgttaaaaaataaaaagcttgagcagcaattcatattactgtcacaggtatttttgctgtgctgtgcaaggtaactctgctagctaagattcacaatgttgaaagcccttttcctaactatgctgactctggcgctggtcaagtcacaggacaccgaagaaaccatcacgtacacgcaatgcactgacggatatgagtgggatcctgtgagacagcaatgcaaagatattgatgaatgtgacattgtcccagacgcttgtaaaggtggaatgaagtgtgtcaaccactatggaggatacctctgccttccgaaaacagcccagattattgtcaataatgaacagcctcagcaggaaacacaaccagcagaaggaacctcaggggcaaccaccggggttgtagctgccagcagcatggcaaccagtggagtgttgcccgggggtggttttgtggccagtgctgctgcagtcgcaggccctgaaatgcagactggccgaaataactttgtcatccggcggaacccagctgaccctcagcgcattccctccaacccttcccaccgtatccagtgtgcagcaggctacgagcaaagtgaacacaacgtgtgccaagacatagacgagtgcactgcagggacgcacaactgtagagcagaccaagtgtgcatcaatttacggggatcctttgcatgtcagtgccctcctggatatcagaagcgaggggagcagtgcgtagacatagatgaatgtaccatccctccatattgccaccaaagatgcgtgaatacaccaggctcattttattgccagtgcagtcctgggtttcaattggcagcaaacaactatacctgcgtagatataaatgaatgtgatgccagcaatcaatgtgctcagcagtgctacaacattcttggttcattcatctgtcagtgcaatcaaggatatgagctaagcagtgacaggctcaactgtgaagacattgatgaatgcagaacctcaagctacctgtgtcaatatcaatgtgtcaatgaacctgggaaattctcatgtatgtgcccccagggataccaagtggtgagaagtagaacatgtcaagatataaatgagtgtgagaccacaaatgaatgccgggaggatgaaatgtgttggaattatcatggcggcttccgttgttatccacgaaatccttgtcaagatccctacattctaacaccagagaaccgatgtgtttgcccagtctcaaatgccatgtgccgagaactgccccagtcaatagtctacaaatacatgagcatccgatctgataggtctgtgccatcagacatcttccagatacaggccacaactatttatgccaacaccatcaatacttttcggattaaatctggaaatgaaaatggagagttctacctacgacaaacaagtcctgtaagtgcaatgcttgtgctcgtgaagtcattatcaggaccaagagaacatatcgtggacctggagatgctgacagtcagcagtatagggaccttccgcacaagctctgtgttaagattgacaataatagtggggccattttcattttagtcttttctaagagtcaaccacaggcatttaagtcagccaaagaatattgttaccttaaagcactattttatttatagatatatctagtgcatctacatctctatactgtacactcacccataacaaacaattacaccatggtataaagtgggcatttaatatgtaaagattcaaagtttgtctttattactatatgtaaattagacattaatccactaaactggtcttcttcaagagagctaagtatacactatctggtgaaacttggattctttcctataaaagtgggaccaagcaatgatgatcttctgtggtgcttaaggaaacttactagagctccactaacagtctcataaggaggcagccatcataaccattgaatagcatgcaagggtaagaatgagtttttaactgctttgtaagaaaatggaaaaggtcaataaagatatatttctttagaaaatggggatctgccatatttgtgttggtttttattttcatatccagcctaaaggtggttgtttattatatagtaataaatcattgctgtacaacatgctggtttctgtagggtatttttaattttgtcagaaattttagattgtgaatattttgtaaaaaacagtaagcaaaattttccagaattcccaaaatgaaccagataccccctagaaaattatactattgagaaatctatggggaggatatgagaaaataaattccttctaaaccacattggaactgacctgaagaagcaaactcggaaaatataataacatccctgaattcaggcattcacaagatgcagaacaaaatggataaaaggtatttcactggagaagttttaatttctaagtaaaatttaaatcctaacacttcactaatttataactaaaatttctcatcttcgtacttgatgctcacagaggaagaaaatgatgatggtttttattcctggcatccagagtgacagtgaacttaagcaaattaccctcctacccaattctatggaatattttatacgtctccttgtttaaaatctgactgctttactttgatgtatcatatttttaaataaaaataaatattcctttagaagatcactctaaaa

SEQ ID NO: 678 - protein, 693 aa, Homo sapiens
MTPQSLLQTTLFLLSLLFLVQGAHGRGHREDFRFCSQRNQTHRSSLHYKPTPDLRISIENSEEALTVHAPFPAAHPASRSFPDPRGLYHFCLYWNRHAGRLHLLYGKRDFLLSDKASSLLCFQHQEESLAQGPPLLATSVTSWWSPQNISLPSAASFTFSFHSPPHTAAHNASVDMCELKRDLQLLSQFLKHPQKASRRPSAAPASQQLQSLESKLTSVRFMGDMVSFEEDRINATVWKLQPTAGLQDLHIHSRQEEEQSEIMEYSVLLPRTLFQRTKGRSGEAEKRLLLVDFSSQALFQDKNSSHVLGEKVLGIVVQNTKVANLTEPVVLTFQHQLQPKNVTLQCVFWVEDPTLSSPGHWSSAGCETVRRETQTSCFCNHLTYFAVLMVSSVEVDAVHKHYLSLLSYVGCVVSALACLVTIAAYLCSRVPLPCRRKPRDYTIKVHMNLLLAVFLLDTSFLLSEPVALTGSEAGCRASAIFLHFSLLTCLSWMGLEGYNLYRLVVEVFGTYVPGYLLKLSAMGWGFPIFLVTLVALVDVDNYGPIILAVHRTPEGVIYPSMCWIRDSLVSYITNLGLFSLVFLFNMAMLATMVVQILRLRPHTQKWSHVLTLLGLSLVLGLPWALIFFSFASGTFQLVVLYLFSIITSFQGFLIFIWYWSMRLQARGGPSPLKSNSDSARLPISSGSTSSSRI

SEQ ID NO: 679 - DNA, 3711 bp, Homo sapiens
ggcacgaggtggagggtctcgctctgtcacacaggctggagtgcagtggtgtgatcttggctcatcgtaacctccacctcccgggttcaagtgattctcatgcctcagcctcccgagtagctgggattacaggtggtgacttccaagagtgactccgtcggaggaaaatgactccccagtcgctgctgcagacgacactgttcctgctgagtctgctcttcctggtccaaggtgcccacggcaggggccacagggaagactttcgcttctgcagccagcggaaccagacacacaggagcagcctccactacaaacccacaccagacctgcgcatctccatcgagaactccgaagaggccctcacagtccatgcccctttccctgcagcccaccctgcttcccgatccttccctgaccccaggggcctctaccacttctgcctctactggaaccgacatgctgggagattacatcttctctatggcaagcgtgacttcttgctgagtgacaaagcctctagcctcctctgcttccagcaccaggaggagagcctggctcagggccccccgctgttagccacttctgtcacctcctggtggagccctcagaacatcagcctgcccagtgccgccagcttcaccttctccttccacagtcctccccacacggccgctcacaatgcctcggtggacatgtgcgagctcaaaagggacctccagctgctcagccagttcctgaagcatccccagaaggcctcaaggaggccctcggctgcccccgccagccagcagttgcagagcctggagtcgaaactgacctctgtgagattcatgggggacatggtgtccttcgaggaggaccggatcaacgccacggtgtggaagctccagcccacagccggcctccaggacctgcacatccactcccggcaggaggaggagcagagcgagatcatggagtactcggtgctgctgcctcgaacactcttccagaggacgaaaggccggagcggggaggctgagaagagactcctcctggtggacttcagcagccaagccctgttccaggacaagaattccagccacgtcctgggtgagaaggtcttggggattgtggtacagaacaccaaagtagccaacctcacggagcccgtggtgctcaccttccagcaccagctacagccgaagaatgtgactctgcaatgtgtgttctgggttgaagaccccacattgagcagcccggggcattggagcagtgctgggtgtgagaccgtcaggagagaaacccaaacatcctgcttctgcaaccacttgacctactttgcagtgctgatggtctcctcggtggaggtggacgccgtgcacaagcactacctgagcctcctctcctacgtgggctgtgtcgtctctgccctggcctgccttgtcaccattgccgcctacctctgctccagggtgcccctgccgtgcaggaggaaacctcgggactacaccatcaaggtgcacatgaacctgctgctggccgtcttcctgctggacacgagcttcctgctcagcgagccggtggccctgacaggctctgaggctggctgccgagccagtgccatcttcctgcacttctccctgctcacctgcctttcctggatgggcctcgaggggtacaacctctaccgactcgtggtggaggtctttggcacctatgtccctggctacctactcaagctgagcgccatgggctggggcttccccatctttctggtgacgctggtggccctggtggatgtggacaactatggccccatcatcttggctgtgcataggactccagagggcgtcatctacccttccatgtgctggatccgggactccctggtcagctacatcaccaacctgggcctcttcagcctggtgtttctgttcaacatggccatgctagccaccatggtggtgcagatcctgcggctgcgcccccacacccaaaagtggtcacatgtgctgacactgctgggcctcagcctggtccttggcctgccctgggccttgatcttcttctcctttgcttctggcaccttccagcttgtcgtcctctaccttttcagcatcatcacctccttccaaggcttcctcatcttcatctggtactggtccatgcggctgcaggcccggggtggcccctcccctctgaagagcaactcagacagcgccaggctccccatcagctcgggcagcacctcgtccagccgcatctaggcctccagcccacctgcccatgtgatgaagcagagatgcggcctcgtcgcacactgcctgtggcccccgagccaggcccagccccaggccagtcagccgcagactttggaaagcccaacgaccatggagagatgggccgttgccatggtggacggactcccgggctgggcttttgaattggccttggggactactcggctctcactcagctcccacgggactcagaagtgcgccgccatgctgcctagggtactgtccccacatctgtcccaacccagctggaggcctggtctctccttacaaaccctgggcccagccctcattgctgggggccaggccttggatcttgagggtctggcacatccttaatcctgtgcccctgcctgggacagaaatgtggctccagttgctctgtctctcgtggtcaccctgagggcactctgcatcctctgtcattttaacctcaggtggcacccagggcgaatggggcccagggcagaccttcagggccagagccctggcggaggagaggccctttgccaggagcacagcagcagctcgcctacctctgagcccaggccccctccctccctcagccccccagtcctccctccatcttccctggggttctcctcctctcccagggcctccttgctccttcgttcacagctgggggtccccgattccaatgctgttttttggggagtggtttccaggagctgcctggtgtctgctgtaaatgtttgtctactgcacaagcctcggcctgcccctgagccaggctcggtaccgatgcgtgggctgggctaggtccctctgtccatctgggcctttgtatgagctgcattgcccttgctcaccctgaccaagcacacgcctcagaggggccctcagcctctcctgaagccctcttgtggcaagaactgtggaccatgccagtcccgtctggtttccatcccaccactccaaggactgagactgacctcctctggtgacactggcctagagcctgacactctcctaagaggttctctccaagcccccaaatagctccaggcgccctcggccgcccatcatggttaattctgtccaacaaacacacacgggtagattgctggcctgttgtaggtggtagggacacagatgaccgacctggtcactcctcctgccaacattcagtctggtatgtgaggcgtgcgtgaagcaagaactcctggagctacagggacagggagccatcattcctgcctgggaatcctggaagacttcctgcaggagtcagcgttcaatcttgaccttgaagatgggaaggatgttctttttacgtaccaattcttttgtcttttgatattaaaaagaagtacatgttcattgtagagaatttggaaactgtagaagagaatcaagaagaaaaataaaaatcagctgttgtaatcgcctagcaaaaaaaaaaaaaaaaaaa

SEQ ID NO: 680 - protein, 331 aa, Homo sapiens
MTAKMETTFYDDALNASFLPSESGPYGYSNPKILKQSMTLNLADPVGSLKPHLRAKNSDLLTSPDVGLLKLASPELERLIIQSSNGHITTTPTPTQFLCPKNVTDEQEGFAEGFVRALAELHSQNTLPSVTSAAQPVNGAGMVAPAVASVAGGSGSGGFSASLHSEPPVYANLSNFNPGALSSGGGAPSYGAAGLAFPAQPQQQQQPPHHLPQQMPVQHPRLQALKEEPQTVPEMPGETPPLSPIDMESQERIKAERKRMRNRIAASKCRKRKLERIARLEEKVKTLKAQNSELASTANMLREQVAQLKQKVMNHVNSGCQLMLTQQLQTF

SEQ ID NO: 681 - DNA, 3254 bp, Homo sapiens
agagttgcactgagtgtggctgaagcagcgaggcgggagtggaggtgcgcggagtcaggcagacagacagacacagccagccagccaggtcggcagtatagtccgaactgcaaatcttattttcttttcaccttctctctaactgcccagagctagcgcctgtggctcccgggctggtggttcgggagtgtccagagagccttgtctccagccggccccgggaggagagccctgctgcccaggcgctgttgacagcggcggaaagcagcggtaccccacgcgcccgccgggggacgtcggcgagcggctgcagcagcaaagaactttcccggcggggaggaccggagacaagtggcagagtcccggagcgaacttttgcaagcctttcctgcgtcttaggcttctccacggcggtaaagaccagaaggcggcggagagccacgcaagagaagaaggacgtgcgctcagcttcgctcgcaccggttgttgaacttgggcgagcgcgagccgcggctgccgggcgccccctccccctagcagcggaggaggggacaagtcgtcggagtccgggcggccaagacccgccgccggccggccactgcagggtccgcactgatccgctccgcggggagagccgctgctctgggaagtgagttcgcctgcggactccgaggaaccgctgcgcccgaagagcgctcagtgagtgaccgcgacttttcaaagccgggtagcgcgcgcgagtcgacaagtaagagtgcgggaggcatcttaattaaccctgcgctccctggagcgagctggtgaggagggcgcagcggggacgacagccagcgggtgcgtgcgctcttagagaaactttccctgtcaaaggctccggggggcgcgggtgtcccccgcttgccagagccctgttgcggccccgaaacttgtgcgcgcacgccaaactaacctcacgtgaagtgacggactgttctatgactgcaaagatggaaacgaccttctatgacgatgccctcaacgcctcgttcctcccgtccgagagcggaccttatggctacagtaaccccaagatcctgaaacagagcatgaccctgaacctggccgacccagtggggagcctgaagccgcacctccgcgccaagaactcggacctcctcacctcgcccgacgtggggctgctcaagctggcgtcgcccgagctggagcgcctgataatccagtccagcaacgggcacatcaccaccacgccgacccccacccagttcctgtgccccaagaacgtgacagatgagcaggaggggttcgccgagggcttcgtgcgcgccctggccgaactgcacagccagaacacgctgcccagcgtcacgtcggcggcgcagccggtcaacggggcaggcatggtggctcccgcggtagcctcggtggcagggggcagcggcagcggcggcttcagcgccagcctgcacagcgagccgccggtctacgcaaacctcagcaacttcaacccaggcgcgctgagcagcggcggcggggcgccctcctacggcgcggccggcctggcctttcccgcgcaaccccagcagcagcagcagccgccgcaccacctgccccagcagatgcccgtgcagcacccgcggctgcaggccctgaaggaggagcctcagacagtgcccgagatgcccggcgagacaccgcccctgtcccccatcgacatggagtcccaggagcggatcaaggcggagaggaagcgcatgaggaaccgcatcgctgcctccaagtgccgaaaaaggaagctggagagaatcgcccggctggaggaaaaagtgaaaaccttgaaagctcagaactcggagctggcgtccacggccaacatgctcagggaacaggtggcacagcttaaacagaaagtcatgaaccacgttaacagtgggtgccaactcatgctaacgcagcagttgcaaacattttgaagagagaccgtcgggggctgaggggcaacgaagaaaaaaaataacacagagagacagacttgagaacttgacaagttgcgacggagagaaaaaagaagtgtccgagaactaaagccaagggtatccaagttggactgggttcggtctgacggcgcccccagtgtgcacgagtgggaaggacttggtcgcgccctcccttggcgtggagccagggagcggccgcctgcgggctgccccgctttgcggacgggctgtccccgcgcgaacggaacgttggactttcgttaacattgaccaagaactgcatggacctaacattcgatctcattcagtattaaaggggggagggggagggggttacaaactgcaatagagactgtagattgcttctgtagtactccttaagaacacaaagcggggggagggttggggaggggcggcaggagggaggtttgtgagagcgaggctgagcctacagatgaactctttctggcctgctttcgttaactgtgtatgtacatatatatattttttaatttgattaaagctgattactgtcaataaacagcttcatgcctttgtaagttatttcttgtttgtttgtttgggtatcctgcccagtgttgtttgtaaataagagatttggagcactctgagtttaccatttgtaataaagtatataatttttttatgttttgtttctgaaaattccagaaaggatatttaagaaaatacaataaactattggaaagtactcccctaacctcttttctgcatcatctgtagatcctagtctatctaggtggagttgaaagagttaagaatgctcgataaaatcactctcagtgcttcttactattaagcagtaaaaactgttctctattagacttagaaataaatgtacctgatgtacctgatgctatgtcaggcttcatactccacgctcccccagcgtatctatatggaattgcttaccaaaggctagtgcgatgtttcaggaggctggaggaaggggggttgcagtggagagggacagcccactgagaagtcaaacatttcaaagtttggattgcatcaagtggcatgtgctgtgaccatttataatgttagaaattttacaataggtgcttattctcaaagcaggaattggtggcagattttacaaaagatgtatccttccaatttggaatcttctctttgacaattcctagataaaaagatggcctttgtcttatgaatatttataacagcattctgtcacaataaatgtattcaaataccaat

SEQ ID NO: 682 - protein, 167 aa, Homo sapiens
MEHIHDSDGSSSSSHQSLKSTAKWAASLENLLEDPEGVKRFREFLKKEFSEENVLFWLACEDFKKMQDKTQMQEKAKEIYMTFLSSKASSQVNVEGQSRLNEKILEEPHPLMFQKLQDQIFNLMKYDSYSRFLKSDLFLKHKRTEEEEEDLPDAQTAAKRASRIYNT

SEQ ID NO: 683 - DNA, 664 bp, Homo sapiens
ggattgttggtctgcgtggaacttctcaggtggacaccagagcatggaacacatccacgacagcgatggcagttccagcagcagccaccagagcctcaagagcacagccaaatgggcggcatccctggagaatctgctggaagacccagaaggcgtgaaaagatttagggaatttttaaaaaaggaattcagtgaagaaaatgttttgttttggctagcatgtgaagattttaagaaaatgcaagataagacgcagatgcaggaaaaggcaaaggagatctacatgacctttctgtccagcaaggcctcatcacaggtcaacgtggaggggcagtctcggctcaacgagaagatcctggaagaaccgcaccctctgatgttccagaaactccaggaccagatctttaatctcatgaagtacgacagctacagccgctttcttaagtctgacttgtttttaaaacacaagcgaaccgaggaagaggaagaagatttgcctgatgctcaaactgcagctaaaagagcttccagaatttataacacatgagcccccaaaaagccgggactggcagctttaagaagcaaaggaatttcctctcaggacgtgccgggtttatcattgctttgttatttgtaaggactgaaatgtacaaaacccttcaat

SEQ ID NO: 684 - protein, 730 aa, Homo sapiens
RHTRTHRDTRHTYTHAHTDAHTCTHMHRDTQMHTHTICRKKYALTNIQAAMGLSDPAAQPLLGNGSANIKLVKNGENQLRKAAEQGQQDPNKNLSPTAVINITSEKLEGKEPHPQDSSSCEILPSQPRRTKSFLNYYADLETSARELEQNRGNHHGTAEEKSQPVQGQASTIIGNGDLLLQKPNRPQSSPEDGQVATVSSSPETKKDHPKTGAKTDCALHRIQNLAPSDEESSWTTLSQDSASPSSPDETDIWSDHSFQTDPDLPPGWKRVSDIAGTYYWHIPTGTTQWERPVSIPADLQGSRKGSLSSVTPSPTPENEKQPWSDFAVLNGGKINSDIWKDLHAATVNPDPSLKEFEGATLRYASLKLRNAPHPDDDDSCSINSDPEAKCFAVRSLGWVEMAEEDLAPGKSSVAVNNCIRQLSYCKNDIRDTVGIWGEGKDMYLILENDMLSLVDPMDRSVWHSQPIVSIRVWGVGRDNGRDFAYVARDKDTRILKCHVFRCDTPAKAIATSLHEICSKIMAERKNAKALACSSLQERANVNLDVPLQVDFPTPKTELVQKFHVQYLGMLPVDKPVGMDILNSAIENLMTSSNKEDWLSVNMNVADATVTVISEKNEEEVLVECRVRFLSFMGVGKDVHTFAFIMDTGNQRFECHVFWCEPNAGNVSEAVQAACMLRYQKCLVARPPSQKVRPPPPPADSVTRRVTTNVKRGVLSLIDTLKQKRPVTEMP

SEQ ID NO: 685 - DNA, 2912 bp, Homo sapiens
gcagacacacacggacacacagagacaccagacacacatatacacatgcacacacagatgcacacacatgcacacacatgcacagagacacacagatgcacacacacacgatatgcagaaaaaaatatgcactaactaacatccaggcggccatgggcctctcggatccagctgcacagcccctgctgggaaatggctctgccaacatcaagctggtgaaaaatggggagaaccagctccgtaaggctgcagagcaagggcagcaggaccccaacaaaaacctgagccccactgcagtcatcaacataacttctgagaagttagagggtaaagagccccacccacaggattcctcgagctgtgagattttaccctcccagcccaggagaactaagagcttcctaaattactatgcagatctggaaacctcagccagagaactagagcagaaccgaggcaatcaccatgggactgcggaagagaaatcccagccagtccagggccaggcctccaccatcattgggaatggcgatttgctgctgcagaaaccaaacagaccccagtccagccctgaagacggccaagtagccacagtgtcatccagcccagaaaccaagaaggatcatccgaaaacaggggccaaaaccgactgtgcactgcaccggatccagaacctggcaccgagcgatgaggagtccagctggacaacgttgtcccaagacagtgcctcacccagctccccggatgaaacagatatatggagtgatcactcatttcagactgatccagatttgccgcctggctggaaaagagtcagtgacattgccgggacctattattggcacatcccaacaggaacgactcagtgggaacggcccgtctccatcccagcagatctccagggttctaggaaagggtcacttagttctgtaacgccatctcccaccccagagaacgagaaacagccatggagtgattttgctgttctgaatgggggaaagattaatagtgacatttggaaggatttgcatgcagccactgttaacccggaccccagtttaaaagagtttgaaggagcaaccctacgctatgcatctttgaaactcagaaatgccccacaccctgatgatgatgattcttgtagtatcaacagtgacccagaagccaagtgttttgctgtgcgttctctgggatgggtagagatggcagaagaggacctcgcccccggtaaaagtagtgttgcggtcaacaactgcatcaggcaactttcctactgcaaaaatgacatccgagacacagtcgggatttggggagaggggaaagacatgtacctgatcctggagaatgacatgctcagcctggtggaccccatggaccgcagcgtctggcactcgcagcccatcgtcagcatccgcgtgtggggcgtgggccgcgacaatggccgggattttgcttatgtagcaagagataaagatacaagaattttgaaatgtcatgtatttcgatgtgacacaccagcaaaagccattgccacaagtctccacgagatctgctccaagattatggctgaacggaagaatgccaaagcgctggcctgcagctccttacaggaaagggccaatgtgaacctcgatgtccctttgcaagtagattttccaacaccaaagactgagctggtccagaagttccacgtgcagtacttgggcatgttacctgtagacaaaccagtcggaatggatattttgaacagtgccatagaaaatcttatgacctcatccaacaaggaggactggctgtcagtgaacatgaacgtggctgatgccactgtgactgtcatcagtgaaaagaatgaagaggaagtcttagtggaatgtcgtgtgcgattcctgtccttcatgggtgttgggaaggacgtccacacatttgccttcatcatggacacggggaaccagcgctttgagtgccacgttttctggtgcgagcctaatgctggtaacgtgtctgaagcggtgcaggccgcctgcatgttacgatatcagaagtgcttggtagccaggccgccttctcagaaagttcgaccacctccaccgccagcagattcagtaaccagaagagtcacaaccaatgtaaaacgaggggtcttatccctcattgacactttgaaacagaaacgccctgtcaccgaaatgccatagctgcacatgcaaaaggactcggctatttacctgaagattgactagctacactaaagaaaatgaactccgccatccgaccttccatccagttgctgatgctttgtcttcagagaatttacccttaaccaagcagtgttagacaagcatgttctctcgtcttgccaccatcatgtgatatgaaaagaagcatgaataattttttttgctgtaagttacatcatgcgcagtggaaggtctttttcttattgtaaatattgtgaacattacttaacttcacacacacacagagaagagtctggccccacccctcctagtgaactaacgctgcgtccttggaatgaatgatgcgtgagttagtttcactgtcttcttggctggacctgtcacaagcaacctttaagtcctacagcactttgccctgttttcaacattggagtaggcactgcatagcagataccattgaattgctgtaaaaataggatggcgagtttgtgttttaatttttcataaaattgaacctgttggttgacaaaattggctgttggcatcagtatagaaaccaactggcagctttccctgacaagctctttgacacatggacaccatttcatgtctacagctgtttgtgggatgttggaaaaaaatgaaacttcaaaattgatgaaaaactaaattcgaggaattaaaatcgaacaaaacataaaaaaaaaaaaaaaa

SEQ ID NO: 686 - protein, 196 aa, Homo sapiens
MAAIRKKLVVVGDGACGKTCLLIVFSKDEFPEVYVPTVFENYVADIEVDGKQVELALWDTAGQEDYDRLRPLSYPDTDVILMCFSVDSPDSLENIPEKWVPEVKHFCPNVPIILVANKKDLRSDEHVRTELARMKQEPVRTDDGRAMAVRIQAYDYLECSAKTKEGVREVFETATRAALQKRYGSQNGCINCCKVL

SEQ ID NO: 687 - DNA, 591 bp, Homo sapiens
atggcggccatccgcaagaagctggtggtggtgggcgacggcgcgtgtggcaagacgtgcctgctgatcgtgttcagtaaggacgagttccccgaggtgtacgtgcccaccgtcttcgagaactatgtggccgacattgaggtggacggcaagcaggtggagctggcgctgtgggacacggcgggccaggaggactacgaccgcctgcggccgctctcctacccggacaccgacgtcattctcatgtgcttctcggtggacagcccggactcgctggagaacatccccgagaagtgggtccccgaggtgaagcacttctgtcccaatgtgcccatcatcctggtggccaacaaaaaagacctgcgcagcgacgagcatgtccgcacagagctggcccgcatgaagcaggaacccgtgcgcacggatgacggccgcgccatggccgtgcgcatccaagcctacgactacctcgagtgctctgccaagaccaaggaaggcgtgcgcgaggtcttcgagacggccacgcgcgccgcgctgcagaagcgctacggctcccagaacggctgcatcaactgctgcaaggtgctatga

SEQ ID NO: 688 - protein, 226 aa, Homo sapiens
MEGCVSNLMVCNLAYSGKLEELKESILADKSLATRTDQDSRTALHWACSAGHTEIVEFLLQLGVPVNDKDDAGWSPLHIAASAGRDEIVKALLGKGAQVNAVNQNGCTPLHYAASKNRHEIAVMLLEGGANPDAKDHYEATAMHRAAAKGNLKMIHILLYYKASTNIQDTEGNTPLHLACDEERVEEAKLLVSQGASIYIENKEEKTPLQVAKGGLGLILKRMVEG

SEQ ID NO: 689 - DNA, 1546 bp, Homo sapiens
attggtgaagctctaacggctgttttgactggcgtagccggagccggcgacgtgaggcgggcgttgctcgcgcgacaagtagttgctgggacagcgaaatggaggggtgtgtgtctaacctaatggtctgcaacctggcctacagcgggaagctggaagagttgaaggagagtattctggccgataaatccctggctactagaactgaccaggacagcagaactgcattgcactgggcatgctcagctggacatacagaaattgttgaatttttgttgcaacttggagtgccagtgaatgataaagacgatgcaggttggtctcctcttcatattgcggcttctgctggccgggatgagattgtaaaagcccttctgggaaaaggtgctcaagtgaatgctgtcaatcaaaatggctgtactcccttacattatgcagcttcgaaaaacaggcatgagatcgctgtcatgttactggaaggcggggctaatccagatgctaaggaccattatgaggctacagcaatgcaccgggcagcagccaagggtaacttgaagatgattcatatccttctgtactacaaagcatccacaaacatccaagacactgagggtaacactcctctacacttagcctgtgatgaggagagagtggaagaagcaaaactgctggtgtcccaaggagcaagtatttacattgagaataaagaagaaaagacacccctgcaagtggccaaaggtggcctgggtttaatactcaagagaatggtggaaggttaaacagcttggatttattcttactttgtatgttgtgttgttgtccccagtgtcctacaaactaatgtatttgtgcacaagacatcatctatgaatgatgaagttttctcaccttcaaagtcttataaacatgttgactcttgttcctgctgagttacttgttcgaagcttacagcttgttttccaggcatcgaataactgttgagattgttctactgttgtcgtatattcttctatattgaattctggttaatttggagtaactaattctgtggctgttgtgagtcttcagcaccctcccatgtaccttatatccctctctgaaacagaacagctccaatagcaacaagctagttgttctgccagatgtttctatgtggattctgtaatgttcctccatacagttaaaacatcctaacttgtttttcaagctcactcaggcctacgccaaacgtttctgttttttttaaccatgaggtttaatttatttttgtgataggagggatatttacatattttagtggaccacattttaagttggatggtgtgctctaaaatactgaaaaacaatagcccatatacctatgtatttgtttttgatgggttgtttactctgaaataaaatgtatggttttcttaaaaggaagttttaaagtacctattttgtgtcatcctgtattgaaaagaatgtcaagcttgttaaaatgacatgtaacaaaaatgtattttgatttgtatttcagaaactaaaaaataaaatgttgaaagaa

SEQ ID NO: 690 - protein, 661 aa, Homo sapiens
MEGAAAPVAGDRPDLGLGAPGSPREAVAGATAALEPRKPHGVKRHHHKHNLKHRYELQETLGKGTYGKVKRATERFSGRVVAIKSIRKDKIKDEQDMVHIRREIEIMSSLNHPHIISIYEVFENKDKIVIIMEYASKGELYDYISERRRLSERETRHFFRQIVSAVHYCHKNGVVHRDLKLENILLDDNCNIKIADFGLSNLYQKDKFLQTFCGSPLYASPEIVNGRPYRGPEVDSWALGVLLYTLVYGTMPFDGFDHKNLIRQISSGEYREPTQPSDARGLIRWMLMVNPDRRATIEDIANHWWVNWGYKSSVCDCDALHDSESPLLARIIDWHHRSTGLQADTEAKMKGLAKPTTSEVMLERQRSLKKSKKENDFAQSGQDAVPESPSKLSSKRPKGILKKRSNSEHRSHSTGFIEGVVGPALPSTFKMEQDLCRTGVLLPSSPEAEVPGKLSPKQSATMPKKGILKKTQQRESGYYSSPERSESSELLDSNDVMGSSIPSPSPPDPARVTSHSLSCRRKGILKHSSKYSAGTMDPALVSPEMPTLESLSEPGVPAEGLSRSYSRPSSVISDDSVLSSDSFDLLDLQENRPARQRIRSCVSAENFLQIQDFEGLQNRPRPQYLKRYRNRLADSSFSLLTDMDDVTQVYKQALEICSKLN

SEQ ID NO: 691 - DNA, 6828 bp, Homo sapiens
aatctcccaaggcctaaggaggcaagaggcctgcaaatcgcctcctgctcagcaaacgggttgctcagcaggcccggggtcctggtccaccccaggtccctggtttgcccacctccgatggcggccttcgctggcagggtgggcgcctctggggagccagctccgtcccggcgcctttagagccccatctcttccacgtccctggccttcctccccttccaggcggctgtccccgccggggtccagatggtgtcggagggccggcggttcgacggcgggcccggggttcagcctcccggcctccctccgtccctgactctcctttcttcggagagggcgcgggggccggggccaaagcgccgctcttggggttctcctggactcggagttgccccaggcgggcgcagctctgccccgcggggtgccagcctcgggcgggcaaggtccgtgagtcaccgcctgtaaccgaacaccaggcctccctgccccctcccccagctccggccgccaggctgcggcgacacctacaagaaaatgaaggggcgcccaggcccgcggcggccccggccgtatcgcgagcaggtcccggcggcccccggctcgcggcgctctttcttccccggccccggggctcggccagccgcaaccgccgccccggcgccagcaggaatccaggccgagcgaccggccccggagcccgaggcggcggagggcccgcggtagctgcgactggcgagcccgagagcgcccggggagggggcgcccggcttggaatttcccggtcccttccggcccagcgaggacaaagcactcctggccgccgccgccgccgccgccgtggcctacgccgcgccgcacaaagggcgagtcgcgacacgctcccatccccctcccagctcacggcggccccggccccgggtggctgcagggaggtgggggaagccctggctgcaccgcccctcgctccccctcccctggggccgcgcgagcgccgcccccgccccgtctgcgcgtcctcccggggaggggttggggggcgcggcgccccacataacactccccctcctgcgctgcgagccaccctctcccctccctcctgcaaacaccaccgcctcccctgccaccgccgccacctcgcccgacgctccacagctcgccgcggccggggggcggtgcgcggaccgtgcgcgccgcgggcgccagatgtgcagtccccgccgccgccagtgaccgagccgcagtccgagcggtatcgggccgcctccctgatgctgcgggggcgaccttgagcgtacagcggcttccctcggtggggaccccgacatcccagcgctgtgcccggtcttgccctctgtagcccggctcgccccgcgcttggacatggaaggggccgccgcgcctgtggcgggggaccgccccgacttggggctgggggcgccgggctctccccgagaggcggtggcgggggcgactgcagccctggagcccaggaagccgcacggggtgaagcggcatcaccacaagcacaacttgaagcaccgctacgagctgcaggagaccctgggcaaaggcacctacggcaaagtcaagcgggccaccgagaggttttctggccgagtggttgctataaaatccattcgtaaggacaaaattaaggatgaacaagacatggttcacatcagacgagagattgagatcatgtcatctctcaaccatcctcatatcatcagtatttatgaagtgtttgagaacaaagataagattgtgatcatcatggaatatgccagcaaaggggagctgtacgattacatcagtgagcggcgacgcctcagtgagagggagacccggcacttcttccggcagatcgtctctgctgtgcactattgtcacaagaacggtgtggtccaccgggacttgaagctggaaaatatactgctcgatgacaactgcaatattaagattgctgactttgggctttccaacctgtaccagaaggataagttcttacaaacgttttgtgggagtccactctatgcatctcctgagattgtcaatgggagaccttaccgagggccagaggtggacagctgggccctgggtgtgttgctttacactcttgtttatggaacaatgcccttcgatggtttcgatcacaaaaacctcattcggcaaatcagcagcggagagtaccgggagccaacacagccctcagatgctcgaggactcatacggtggatgctgatggtgaaccccgatcgccgggccactattgaggacattgccaaccactggtgggtgaactggggctataagagcagcgtgtgtgactgtgatgccctccatgactctgagtccccactcctggctcggatcattgactggcaccaccgttccacagggctgcaggctgacaccgaagccaaaatgaagggcctggccaaacccacgacctctgaggtcatgctagagcggcagcggtcgctgaagaaatccaagaaagagaatgactttgctcagtctggtcaggatgcagtgcctgaaagcccatccaagttgagttctaagaggcccaaggggatcctgaagaagcgaagcaacagcgagcatcgctctcacagcactggcttcattgaaggtgtagttggtcctgccttaccctctactttcaagatggagcaggacttgtgcaggactggcgtgctcctcccaagctcaccagaggcagaggtgccgggaaaactcagccccaagcagtcggccacgatgcccaagaaaggcatcttgaaaaagacccagcagagagaatcaggttactactcttccccagagcgcagtgagtcttcggagctgttggacagtaatgatgtgatgggcagcagcatcccctcccccagccccccggacccagccagggtaacctcccacagcctctcctgccggaggaagggcatcttgaaacacagcagcaaatactcagcgggcaccatggacccagccctggtcagccctgaaatgcccacactggaatccctgtcagagcctggtgtccctgccgagggcctctcccggagctacagccgcccttccagtgtcatcagcgatgacagcgtgctgtccagcgactcttttgacttgctggatttgcaggagaatcgccctgcccgccagcgcatccgcagctgcgtctctgcagaaaacttcctccagatccaggactttgaggggctccagaaccggccccggccccagtacctgaagcggtaccggaaccggctggcagacagcagcttctccctcctcacagacatggatgatgtgactcaggtctacaagcaagcgctggagatctgcagcaagctcaactagcattccagggcgcccaggggcgggcgggggtacgagggaggaaggggagcaagacttgggctcacaggctggttacctctttgctggctgtgacaacagactgaaaaaggattggcactgtctcacttggccaagtttgcagccttgagccaacacctaaaagggagaggtgggctcttctgccagttctgtcaattgtcagtcagaatttgggccctgtttggcatttgctttatggcacctcctagaggaccagctgtccaggggaggtggtattgaccggcactcagtgggtggagaggaagcatatgtggaaggagcatttccttagaaatgcttcattcatccagatgcttctggaggaggggcaggagacacttgggctgtttgccttgggcgagcccaaagaacttgccccttttctccttgcattagcaagctaggtctggctgcgtggagctggcaagtagatttcagcaacttgagcttgagttgatgatcaattaatagtggctgccagttgtgctggcgtaagtggcccacatcatggggaaggagtgctgtgattgactagtaatggctaccacgggaaagggaaggggaagcagtagcactaatgctatgtagttgtcatctttgatctggctaggccctgggaatcgggtttagtcatcctgtgggatctgtgttaactctttcatgccactggtgaggcatttgttaatttgctactcaactttgaggaaagacagggccttggtcagagagagaatgctctgaactctgctaaggacatagagtcagcccatggtgatttagctccttgctgttcacctcctctttcctgatgtctgccttgctctacagcacaacctcttgagggtggacagggagaaagatgatggtgtcagaggtcaaaactattatatatgacagggcacaagatggtctgtgatctttgcacagatgaatggaagttgatgcacaccaacaagaggcaacttgtcactttctttctcaatattaactggaatgctgcctcttgggttctcacctgcatggatgctttgagttggatgtgatactgtccatattctccagaggattacctggctgaaccattggctctgttcaccagtgacagatggtttccccatccactgagtgtagcatcctcagaggtaggcaagtttgcttctagggagttagcatgtagatgggatattgggatgaggaaaggaaaatcaggtagatggtgctttttttcccccaaatctaagtattctatgtcatggttttaaactttgccatgaactcctgggctttgggggaagagaaagttccattcatttaaatgaataaggtgttgaaagagtgcagggggttgggaggaagcatgtaagagagggaacatttccttagatgttacccagatggttctgggggagacagaaaagaggtgcggcaggactcttatcttaaaaagtaaacaaaacaaaacaaaacaaaacaaaaaaactagatatgtaatttctaaacacccagatcacaatgacaagatgccactccaaccatgggacaccttcatgatactaggtttgtacttcctggtctctgggatgacttcagattctgctggccaaggcaaattgaactcagttcaagatggccaccactggtagacgtgtagatagaaaagaggactggtcttgggaacatctttggaaaaaccaacaaacaatagttctagggagatgagaaaaaaattcaccttacagtgctaagaaagtgcattagaatggaattgccctttccttaaggagacagtttgggctctccccttgccaccggctctggtgttttggcttatgcgttccttcaggttgagctgagcagtgtgttatgggaagctgctcaatttcctttcattcaattccacctccttcctgaactctaatagaggttaaaagggaaaaaaaaaattctgtagatagcaaattgtgtgtgtgggggggggtgggggtgtgggtgcatggaggacaacctgcaactctgagctccctacttcctgcctcatttcatgcagtcttttctgaacagcctatgctgctgccctgctggccccttgtgcacggcagctggccgtgtccgtagctgtcagtatgacttagatctagctcctacctactggttgatgtgttttttccttttgccaagtgattgagtctgtttagtagtttccatcattctagtctttaagtaaaaatgacactattgaggaaagtcagtctactcccttcttcctccccccaaacacgtgttctcttttgtcaggaaactcagccagtgggctgtggcagagaaagtcctccactcagaggcagagactgagttaagtcataggtggccttaggcatctgcattgtttgcaggggttaagttttccttccagtgagggctggagggatgaattagctggtacctgaagccccgcttagctctgacactctgccaacatcctctgattctaggtgtggtgttgactgtcctttcaaggaaaaacttgcaatagagggaaaagccattaaagcagctccctgcttcatcattaagtcctgtcatccctaccagccaatcccagtcaaagaagttatgctttattcacttctgtggaattacaagtgagagacacttttaggacctgatggacaaagcaggagattcactgtcagctttcctggtcctctccttacttctgtgggccttgcaccgtcttagtttacacatctgccaaaggggtagaattacacttctttttacaggtaaatgtcaaggcacaatcagttttcaggaagtgcttcaagaccccaggtgaaatgaaaatgctaagtaccctctgaatggccatgcctgttaccaggtgctgcttcttcagatgatggggagcacttttcagggtgaaattcaggcgagttttgcccaggcctgctgtcttgagtacaaatgtgaatgatcgactgactgcttgttgccaaactggaaatgttctgtagggatttactggcatggtatcattcctagaagaaaaaaagagagaaacttgactgcacattaaaaaaaaaaaaatccacattgtgacttttatttaatttctattttttttggtaataaaaagttgacttttttatttgaatttgtcttttttatttattggtctgaaaggcatttcaaaggtattataataatatattggtgtaatttaattggtgcaacatgctttatggctcctgtcaaaattggttttcactcatttgattggtttgagcccagaacagcctacaggggaaaaacaagctggataaccacccaaagtgtttgtattttcgttggaaactgatttttgtttcattttggtttttgtttctgtttttatttttaaattaaataaattgcaatgaactg

SEQ ID NO: 692 - protein, 410 aa, Homo sapiens
MVCFRLFPVPGSGLVLVCLVLGAVRSYALELNLTDSENATCLYAKWQMNFTVRYETTNKTYKTVTISDHGTVTYNGSICGDDQNGPKIAVQFGPGFSWIANFTKAASTYSIDSVSFSYNTGDNTTFPDAEDKGILTVDELLAIRIPLNDLFRCNSLSTLEKNDVVQHYWDVLVQAFVQNGTVSTNEFLCDKDKTSTVAPTIHTTVPSPTTTPTPKEKPEAGTYSVNNGNDTCLLATMGLQLNITQDKVASVININPNTTHSTGSCRSHTALLRLNSSTIKYLDFVFAVKNENRFYLKEVNISMYLVNGSVFSIANNNLSYWDAPLGSSYMCNKEQTVSVSGAFQINTFDLRVQPFNVTQGKYSTAQDCSADDDNFLVPIAVGAALAGVLILVLLAYFIGLKHHHAGYEQF

SEQ ID NO: 693 - DNA, 1868 bp, Homo sapiens
ccgattcctggcttttgcaaggctgtggtcggtggtcatcagtgctcttgacccaggtccagcgagccttttccctggtgttgcagctgttgttgtaccgccgccgtcgccgccgtcgccgcctgctctgcggggtcatggtgtgcttccgcctcttcccggttccgggctcagggctcgttctggtctgcctagtcctgggagctgtgcggtcttatgcattggaacttaatttgacagattcagaaaatgccacttgcctttatgcaaaatggcagatgaatttcacagtacgctatgaaactacaaataaaacttataaaactgtaaccatttcagaccatggcactgtgacatataatggaagcatttgtggggatgatcagaatggtcccaaaatagcagtgcagttcggacctggcttttcctggattgcgaattttaccaaggcagcatctacttattcaattgacagcgtctcattttcctacaacactggtgataacacaacatttcctgatgctgaagataaaggaattcttactgttgatgaacttttggccatcagaattccattgaatgacctttttagatgcaatagtttatcaactttggaaaagaatgatgttgtccaacactactgggatgttcttgtacaagcttttgtccaaaatggcacagtgagcacaaatgagttcctgtgtgataaagacaaaacttcaacagtggcacccaccatacacaccactgtgccatctcctactacaacacctactccaaaggaaaaaccagaagctggaacctattcagttaataatggcaatgatacttgtctgctggctaccatggggctgcagctgaacatcactcaggataaggttgcttcagttattaacatcaaccccaatacaactcactccacaggcagctgccgttctcacactgctctacttagactcaatagcagcaccattaagtatctagactttgtctttgctgtgaaaaatgaaaaccgattttatctgaaggaagtgaacatcagcatgtatttggttaatggctccgttttcagcattgcaaataacaatctcagctactgggatgcccccctgggaagttcttatatgtgcaacaaagagcagactgtttcagtgtctggagcatttcagataaatacctttgatctaagggttcagcctttcaatgtgacacaaggaaagtattctacagctcaagactgcagtgcagatgacgacaacttccttgtgcccatagcggtgggagctgccttggcaggagtacttattctagtgttgctggcttattttattggtctcaagcaccatcatgctggatatgagcaattttagaatctgcaacctgattgattatataaaaatacatgcaaataacaagattttcttacctctcagttgttgaaacactttgcttcttaaaattgatatgttgaaactttaattcttttatcaatcccagcattttgagatcagtctttattaataaaacctgttctctttaatcagcttaaaatccaaagtgtcatatttactggtcctggagacaaacttgttcaaaagaacatcaacgtgcaatgttttaaggtctatcttaagaagccctggccaaattttgatcctaaccttgaagtatgccttgaacttattaacatggccattataagaataaaatatgtagttgtgtcttaatggaattaataaatgtcatttcactactggtgttctgttttcaatgtataaggactatagtgatttaaactcatcaatgtgcctttgcataaagttgattaaataaatattgatgtggtataaatgcccatcagatatgct

SEQ ID NO: 694 - protein, 493 aa, Homo sapiens
MALFGALFLALLAGAHAEFPGCKIRVTSKALELVKQEGLRFLEQELETITIPDLRGKEGHFYYNISEVKVTELQLTSSELDFQPQQELMLQITNASLGLRFRRQLLYWFFYDGGYINASAEGVSIRTGLELSRDPAGRMKVSNVSCQASVSRMHAAFGGTFKKVYDFLSTFITSGMRFLLNQQICPVLYHAGTVLLNSLLDTVPVRSSVDELVGIDYSLMKDPVASTSNLDMDFRGAFFPLTERNWSLPNRAVEPQLQEEERMVYVAFSEFFFDSAMESYFRAGALQLLLVGDKVPHDLDMLLRATYFGSIVLLSPAVIDSPLKLELRVLAPPRCTIKPSGTTISVTASVTIALVPPDQPEVQLSSMTMDARLSAKMALRGKALRTQLDLRRFRIYSNHSALESLALIPLQAPLKTMLQIGVMPMLNERTWRGVQIPLPEGINFVHEVVTNHAGFLTIGADLHFAKGLREVIEKNRPADVRASTAPTPSTAAV

SEQ ID NO: 695 - DNA, 1750 bp, Homo sapiens
gtggccgccgtcgcccggatcccctgagctgcccgccatcccacgtgaccgcgccgccccccagctccaccgctgagcccgctcgccatggccctcttcggggccctcttcctagcgctgctggcaggcgcacatgcagagttcccaggctgcaagatccgcgtcacctccaaggcgctggagctggtgaagcaggaggggctgcgctttctggagcaagagctggagactatcaccattccggacctgcggggcaaagaaggccacttctactacaacatctctgaggtgaaggtcacagagctgcaactgacatcttccgagctcgatttccagccacagcaggagctgatgcttcaaatcaccaatgcctccttggggctgcgcttccggagacagctgctctactggttcttctatgatgggggctacatcaacgcctcagctgagggtgtgtccatccgcactggtctggagctctcccgggatcccgctggacggatgaaagtgtccaatgtctcctgccaggcctctgtctccagaatgcacgcggccttcgggggaaccttcaagaaggtgtatgattttctctccacgttcatcacctcagggatgcgcttcctcctcaaccagcagatctgccctgtcctctaccacgcagggacggtcctgctcaactccctcctggacaccgtgcctgtgcgcagttctgtggacgagcttgttggcattgactattccctcatgaaggatcctgtggcttccaccagcaacctggacatggacttccggggggccttcttccccctgactgagaggaactggagcctccccaaccgggcagtggagccccagctgcaggaggaagagcggatggtgtatgtggccttctctgagttcttcttcgactctgccatggagagctacttccgggcgggggccctgcagctgttgctggtgggggacaaggtgccccacgacctggacatgctgctgagggccacctactttgggagcattgtcctgctgagcccagcagtgattgactccccattgaagctggagctgcgggtcctggccccaccgcgctgcaccatcaagccctctggcaccaccatctctgtcactgctagcgtcaccattgccctggtcccaccagaccagcctgaggtccagctgtccagcatgactatggacgcccgtctcagcgccaagatggctctccgggggaaggccctgcgcacgcagctggacctgcgcaggttccgaatctattccaaccattctgcactggagtcgctggctctgatcccattacaggcccctctgaagaccatgctgcagattggggtgatgcccatgctcaatgagcggacctggcgtggggtgcagatcccactacctgagggcatcaactttgtgcatgaggtggtgacgaaccatgcgggattcctcaccatcggggctgatctccactttgccaaagggctgcgagaggtgattgagaagaaccggcctgctgatgtcagggcgtccactgcccccacaccgtccacagcagctgtctgagccctcaatccccaagctggcagctgtcattcaggaccccaacccctctcagcccctcttttcccacattcatagcctgtagtgccccctctaacccccagtgccacagagaagacgggatttgaagctgtacccaatttaattccataatcaatctatcaattacagtccgtccaccacc

SEQ ID NO: 696 - protein, 498 aa, Homo sapiens
MAEDSESAASQQSLELDDQDTCGIDGDNEEETEHAKGSPGGYLGAKKKKKKQKRKKEKPNSGGTKSDSASDSQEIKIQQPSKNPSVPMQKLQDIQRAMELLSACQGPARNIDEAAKHRYQFWDTQPVPKLDEVITSHGAIEPDKDNVRQEPYSLPQGFMWDTLDLSDAEVLKELYTLLNENYVEDDDNMFRFDYSPEFLLWALRPPGWLLQWHCGVRVSSNKKLVGFISAIPANIRIYDSVKKMVEINFLCVHKKLRSKRVAPVLIREITRRVNLEGIFQAVYTAGVVLPKPIATCRYWHRSLNPRKLVEVKFSHLSRNMTLQRTMKLYRLPDVTKTSGLRPMEPKDIKSVRELINTYLKQFHLAPVMDEEEVAHWFLPREHIIDTFVVESPNGKLTDFLSFYTLPSTVMHHPAHKSLKAAYSFYNIHTETPLLDLMSDALILAKSKGFDVFNALDLMENKTFLEKLKFGIGDGNLQYYLYNWRCPGTDSEKVGLVLQ

SEQ ID NO: 697 - DNA, 2838 bp, Homo sapiens
ctccggcccggccccgagcaccgcctccccagccagcgccgccgcgatggcggaggacagcgagtctgcggccagccagcagagcctggaactggacgaccaggacacgtgcgggatagacggggacaatgaggaggagacggagcacgccaaaggaagtcctggagggtatttgggagccaaaaagaaaaagaagaaacagaagagaaaaaaggagaaaccaaattccggaggcaccaagtcagactcggcatctgattcccaggagattaaaattcagcagccttcgaaaaatcccagtgttccaatgcagaagttgcaggatatccagagagcaatggagctgctatccgcatgccagggcccagccaggaacattgatgaggctgcaaagcacagataccagttttgggacacacaaccggtaccaaaactagatgaagtcataacatctcatggtgcaattgaaccagataaagacaacgtacgccaagaaccgtattctttgccacagggttttatgtgggacactttagacttgagtgatgccgaagtgctcaaggagttatacacgttgttaaatgagaattacgtagaagatgatgacaatatgttccgatttgactattcacccgagttcctgttgtgggctctgcgtccaccaggctggctcctgcagtggcactgtggggtcagagtgtcttcaaataaaaaactggtcgggttcataagtgccatcccagcaaacattcggatttatgacagtgtgaagaagatggtagaaatcaactttctttgtgttcataagaagttgagatcgaaacgggtagccccagtgctaatccgagagatcactagaagagtgaacctggaagggatcttccaggctgtgtacaccgcgggagtggttcttcctaagcccatagccacatgcagatactggcatcgatcactaaaccccagaaaattggtagaagtgaaattttctcacttgagtagaaatatgactttacagagaacaatgaagctatacagacttccagatgttacaaagacttcaggtttgagaccaatggaaccaaaagatatcaaatcagttcgagaattaatcaacacttacctgaagcagtttcatctggctccagtgatggatgaagaggaagtagcccactggttcctcccccgggagcacattattgacacgtttgtagtggagagccccaacggtaaactgactgatttcctgagcttctatacgctcccctccacggtgatgcaccaccctgctcacaagagcctcaaagccgcctactcattctacaacatccacacagagacgcccctgctggacctcatgagcgacgcgctcatcctggctaaatcgaaaggatttgatgtattcaatgcactggatttgatggaaaataagacattcttggaaaaactcaagtttggtataggagatggcaatttgcagtattacctgtacaattggaggtgtccaggtacagattctgaaaaggttggactagtactacaatagatggatatttttatttctagaactctgacatcatcatttgttaatatttaatgatttctggaactgccattccaaagaagaataaaagcacaactcaagtgaaattgaagtagtcgataatcagaaaagatgacaaaagtccacatgtgacatttgtacgtttctagctagaatgttaaacttcatcctttttttactgttgacctatttgtgggagggatgaaaggctacaaagagcacattcttgtaattttcaaatttttgcctgtctcttgaagaggtattttttcacccttagaaaagggactgtttttctatggactaagtagaagttacagagtcatgtaagaaaatctttgctattgtgtggagagaaattgctgcatttctgtttcttaagtgatggtacatttgtccatgtaacagaacaaaagatccatttggaaattttttttactggtatcaccttacatggtatcactgggaacatttatggaatcaacacttctgtagctcagtgacaggtggtggttgtttaagtgcagagcaatattaaatgtactggtgactagtacatgtatttctccataagcagagttgccgaatcaataaacatgcaagtttgtactttgatctttaccaggtcagtggattgcttcaaaagcagagttttgtgcaagcactcactgtgctctctgaaagagcctgaggccgggcgtggtggctcacgcctgtaatcccagcactttgggaggccaaggtgggcagatcatgaggtcaggagatcgagaccattctggccaacatagtgaaaccccatctctactaaaaatacaaaaattagccgggcgtggtggcgtgtgcctgtagtcccagctgcttgggaggctgaggcaggagaatcgcttgaacctgagaggtgaggttgcagtgagccgagatcgagccactgcactccagcctgggtgacagagcgtgagactccgtctcaaaaaaaaaaaaaaaagaaagagcctgtacccgcgactaactagacttttcttgctgttgtgcaaagttcagtttcttctcagcaacatcaaggatatatgaagaaaaggaaataaaaaactgtaaagtcaaaagagatgcctggtggaacttattcgtgctatcagggcattgatagtttgaatgtttttattacttatgcaaaattgcacatactcctctatgctgattttatcatgaaaactgtcatgtgtcatgctaatggaaaatgtcttatttgtaaataagtattcataattttgccg

SEQ ID NO: 698 - protein, 780 aa, Homo sapiens
MTHEEHHAAKTLGIGKAIAVLTSGGDAQGMNAAVRAVVRVGIFTGARVFFVHEGYQGLVDGGDHIKEATWESVSMMLQLGGTVIGSARCKDFREREGRLRAAYNLVKRGITNLCVIGGDGSLTGADTFRSEWSDLLSDLQKAGKITDEEATKSSYLNIVGLVGSIDNDFCGTDMTIGTDSALHRIMEIVDAITTTAQSHQRTFVLEVMGRHCGYLALVTSLSCGADWVFIPECPPDDDWEEHLCRRLSETRTRGSRLNIIIVAEGAIDKNGKPITSEDIKNLVVKRLGYDTRVTVLGHVQRGGTPSAFDRILGSRMGVEAVMALLEGTPDTPACVVSLSGNQAVRLPLMECVQVTKDVTKAMDEKKFDEALKLRGRSFMNNWEVYKLLAHVRPPVSKSGSHTVAVMNVGAPAAGMNAAVRSTVRIGLIQGNRVLVVHDGFEGLAKGQIEEAGWSYVGGWTGQGGSKLGTKRTLPKKSFEQISANITKFNIQGLVIIGGFEAYTGGLELMEGRKQFDELCIPFVVIPATVSNNVPGSDFSVGADTALNTICTTCDRIKQSAAGTKRRVFIIETMGGYCGYLATMAGLAAGADAAYIFEEPFTIRDLQANVEHLVQKMKTTVKRGLVLRNEKCNENYTTDFIFNLYSEEGKGIFDSRKNVLGHMQQGGSPTPFDRNFATKMGAKAMNWMSGKIKESYRNGRIFANTPDSGCVLGMRKRALVFQPVAELKDQTDFEHRIPKEQWWLKLRPILKILAKYEIDLDTSDHAHLEHITRKRSGEAAV

SEQ ID NO: 699 - DNA, 2759 bp, Homo sapiens
gcctgactgagagtggatcatgacccatgaagagcaccatgcagccaaaaccctggggattggcaaagccattgctgtcttaacctctggtggagatgcccaaggtatgaatgctgctgtcagggctgtggttcgagttggtatcttcaccggtgcccgtgtcttctttgtccatgagggttatcaaggcctggtggatggtggagatcacatcaaggaagccacctgggagagcgtttcgatgatgcttcagctgggaggcacggtgattggaagtgcccggtgcaaggactttcgggaacgagaaggacgactccgagctgcctacaacctggtgaagcgtgggatcaccaatctctgtgtcattgggggtgatggcagcctcactggggctgacaccttccgttctgagtggagtgacttgttgagtgacctccagaaagcaggtaagatcacagatgaggaggctacgaagtccagctacctgaacattgtgggcctggttgggtcaattgacaatgacttctgtggcactgatatgaccattggcactgactctgccctgcatcggatcatggaaattgtagatgccatcactaccactgcccagagccaccagaggacatttgtgttagaagtaatgggccgccactgtggatacctggcccttgtcacctctctgtcctgtggggccgactgggtttttattcctgaatgtccaccagatgacgactgggaggaacacctttgtcgccgactcagcgagacaaggacccgtggttctcgtctcaacatcatcattgtggctgagggtgcaattgacaagaatggaaaaccaatcacctcagaagacatcaagaatctggtggttaagcgtctgggatatgacacccgggttactgtcttggggcatgtgcagaggggtgggacgccatcagcctttgacagaattctgggcagcaggatgggtgtggaagcagtgatggcacttttggaggggaccccagataccccagcctgtgtagtgagcctctctggtaaccaggctgtgcgcctgcccctcatggaatgtgtccaggtgaccaaagatgtgaccaaggccatggatgagaagaaatttgacgaagccctgaagctgagaggccggagcttcatgaacaactgggaggtgtacaagcttctagctcatgtcagacccccggtatctaagagtggttcgcacacagtggctgtgatgaacgtgggggctccggctgcaggcatgaatgctgctgttcgctccactgtgaggattggccttatccagggcaaccgagtgctcgttgtccatgatggtttcgagggcctggccaaggggcagatagaggaagctggctggagctatgttgggggctggactggccaaggtggctctaaacttgggactaaaaggactctacccaagaagagctttgaacagatcagtgccaatataactaagtttaacattcagggccttgtcatcattgggggctttgaggcttacacagggggcctggaactgatggagggcaggaagcagtttgatgagctctgcatcccatttgtggtcattcctgctacagtctccaacaatgtccctggctcagacttcagcgttggggctgacacagcactcaatactatctgcacaacctgtgaccgcatcaagcagtcagcagctggcaccaagcgtcgggtgtttatcattgagactatgggtggctactgtggctacctggctaccatggctggactggcagctggggccgatgctgcctacatttttgaggagcccttcaccattcgagacctgcaggcaaatgttgaacatctggtgcaaaagatgaaaacaactgtgaaaaggggcttggtgttaaggaatgaaaagtgcaatgagaactataccactgacttcattttcaacctgtactctgaggaggggaagggcatcttcgacagcaggaagaatgtgcttggtcacatgcagcagggtgggagcccaaccccatttgataggaattttgccactaagatgggcgccaaggctatgaactggatgtctgggaaaatcaaagagagttaccgtaatgggcggatctttgccaatactccagattcgggctgtgttctggggatgcgtaagagggctctggtcttccaaccagtggctgagctgaaggaccagacagattttgagcatcgaatccccaaggaacagtggtggctgaaactgaggcccatcctcaaaatcctagccaagtacgagattgacttggacacttcagaccatgcccacctggagcacatcacccggaagcggtccggggaagctgccgtctaaacctctctggagtgaggggaatagattacctgatcatggtcagctcacaccctaataagtccacatcttctcagtgttttagctgtttttttcattaggtttccttttattctgtaccttgcagccatgaccagttctggccaggagctggaggagcaggcagtgggtgggagctccttttaggtagaatttaacatgacttctgccccagctttatctgtcacacaaggctgggcacctctagtgctactgctagatatcacttactcagttagaattttcctaaaaataagctttatttatttctttgtgataacaaagagtcttggttcctctactacttttactacagtgacaaattgtaactacactaataaatgccaactggtcactgtga

SEQ ID NO: 700 - protein, 1822 aa, Homo sapiens
MAGPRPSPWARLLLAALISVSLSGTLANRCKKAPVKSCTECVRVDKDCAYCTDEMFRDRRCNTQAELLAAGCQRESIVVMESSFQITEETQIDTTLRRSQMSPQGLRVRLRPGEERHFELEVFEPLESPVDLYILMDFSNSMSDDLDNLKKMGQNLARVLSQLTSDYTIGFGKFVDKVSVPQTDMRPEKLKEPWPNSDPPFSFKNVISLTEDVDEFRNKLQGERISGNLDAPEGGFDAILQTAVCTRDIGWRPDSTHLLVFSTESAFHYEADGANVLAGIMSRNDERCHLDTTGTYTQYRTQDYPSVPTLVRLLAKHNIIPIFAVTNYSYSYYEKLHTYFPVSSLGVLQEDSSNIVELLEEAFNRIRSNLDIRALDSPRGLRTEVTSKMFQKTRTGSFHIRRGEVGIYQVQLRALEHVDGTHVCQLPEDQKGNIHLKPSFSDGLKMDAGIICDVCTCELQKEVRSARCSFNGDFVCGQCVCSEGWSGQTCNCSTGSLSDIQPCLREGEDKPCSGRGECQCGHCVCYGEGRYEGQFCEYDNFQCPRTSGFLCNDRGRCSMGQCVCEPGWTGPSCDCPLSNATCIDSNGGICNGRGHCECGRCHCHQQSLYTDTICEINYSAIHPGLCEDLRSCVQCQAWGTGEKKGRTCEECNFKVKMVDELKRAEEVVVRCSFRDEDDDCTYSYTMEGDGAPGPNSTVLVHKKKDCPPGSFWWLIPLLLLLLPLLALLLLLCWKYCACCKACLALLPCCNRGHMVGFKEDHYMLRENLMASDHLDTPMLRSGNLKGRDVVRWKVTNNMQRPGFATHAASINPTELVPYGLSLRLARLCTENLLKPDTRECAQLRQEVEENLNEVYRQISGVHKLQQTKFRQQPNAGKKQDHTIVDTVLMAPRSAKPALLKLTEKQVEQRAFHDLKVAPGYYTLTADQDARGMVEFQEGVELVDVRVPLFIRPEDDDEKQLLVEAIDVPAGTATLGRRLVNITIIKEQARDVVSFEQPEFSVSRGDQVARIPVIRRVLDGGKSQVSYRTQDGTAQGNRDYIPVEGELLFQPGEAWKELQVKLLELQEVDSLLRGRQVRRFHVQLSNPKFGAHLGQPHSTTIIIRDPDELDRSFTSQMLSSQPPPHGDLGAPQNPNAKAAGSRKIHFNWLPPSGKPMGYRVKYWIQGDSESEAHLLDSKVPSVELTNLYPYCDYEMKVCAYGAQGEGPYSSLVSCRTHQEVPSEPGRLAFNVVSSTVTQLSWAEPAETNGEITAYEVCYGLVNDDNRPIGPMKKVLVDNPKNRMLLIENLRESQPYRYTVKARNGAGWGPEREAIINLATQPKRPMSIPIIPDIPIVDAQSGEDYDSFLMYSDDVLRSPSGSQRPSVSDDTGCGWKFEPLLGEELDLRRVTWRLPPELIPRLSASSGRSSDAEAPTAPRTTAARAGRAAAVPRSATPGPPGEHLVNGRMDFAFPGSTNSLHRMTTTSAAAYGTHLSPHVPHRVLSTSSTLTRDYNSLTRSEHSHSTTLPRDYSTLTSVSSHDSRLTAGVPDTPTRLVFSALGPTSLRVSWQEPRCERPLQGYSVEYQLLNGGELHRLNIPNPAQTSVVVEDLLPNHSYVFRVRAQSQEGWGREREGVITIESQVHPQSPLCPLPGSAFTLSTPSAPGPLVFTALSPDSLQLSWERPRRPNGDIVGYLVTCEMAQGGGPATAFRVDGDSPESRLTVPGLSENVPYKFKVQARTTEGFGPEREGIITIESQDGGPFPQLGSRAGLFQHPLQSEYSSITTTHTSATEPFLVDGLTLGAQHLEAGGSLTRHVTQEFVSRTLTTSGTLSTHMDQQFFQT

SEQ ID NO: 701 - DNA, 5994 bp, Homo sapiens
gcgctgcccgcctcgtccccaccccccaaccccccgcgcccgccctcggacagtccctgctcgcccgcgcgctgcagccccatctcctagcggcagcccaggcgcggagggagcgagtccgccccgaggtaggtccaggacgggcgcacagcagcagccgaggctggccgggagagggaggaagaggatggcagggccacgccccagcccatgggccaggctgctcctggcagccttgatcagcgtcagcctctctgggaccttggcaaaccgctgcaagaaggccccagtgaagagctgcacggagtgtgtccgtgtggataaggactgcgcctactgcacagacgagatgttcagggaccggcgctgcaacacccaggcggagctgctggccgcgggctgccagcgggagagcatcgtggtcatggagagcagcttccaaatcacagaggagacccagattgacaccaccctgcggcgcagccagatgtccccccaaggcctgcgggtccgtctgcggcccggtgaggagcggcattttgagctggaggtgtttgagccactggagagccccgtggacctgtacatcctcatggacttctccaactccatgtccgatgatctggacaacctcaagaagatggggcagaacctggctcgggtcctgagccagctcaccagcgactacactattggatttggcaagtttgtggacaaagtcagcgtcccgcagacggacatgaggcctgagaagctgaaggagccctggcccaacagtgacccccccttctccttcaagaacgtcatcagcctgacagaagatgtggatgagttccggaataaactgcagggagagcggatctcaggcaacctggatgctcctgagggcggcttcgatgccatcctgcagacagctgtgtgcacgagggacattggctggcgcccggacagcacccacctgctggtcttctccaccgagtcagccttccactatgaggctgatggcgccaacgtgctggctggcatcatgagccgcaacgatgaacggtgccacctggacaccacgggcacctacacccagtacaggacacaggactacccgtcggtgcccaccctggtgcgcctgctcgccaagcacaacatcatccccatctttgctgtcaccaactactcctatagctactacgagaagcttcacacctatttccctgtctcctcactgggggtgctgcaggaggactcgtccaacatcgtggagctgctggaggaggccttcaatcggatccgctccaacctggacatccgggccctagacagcccccgaggccttcggacagaggtcacctccaagatgttccagaagacgaggactgggtcctttcacatccggcggggggaagtgggtatataccaggtgcagctgcgggcccttgagcacgtggatgggacgcacgtgtgccagctgccggaggaccagaagggcaacatccatctgaaaccttccttctccgacggcctcaagatggacgcgggcatcatctgtgatgtgtgcacctgcgagctgcaaaaagaggtgcggtcagctcgctgcagcttcaacggagacttcgtgtgcggacagtgtgtgtgcagcgagggctggagtggccagacctgcaactgctccaccggctctctgagtgacattcagccctgcctgcgggagggcgaggacaagccgtgctccggccgtggggagtgccagtgcgggcactgtgtgtgctacggcgaaggccgctacgagggtcagttctgcgagtatgacaacttccagtgtccccgcacttccgggttcctgtgcaatgaccgaggacgctgctccatgggccagtgtgtgtgtgagcctggttggacaggcccaagctgtgactgtcccctcagcaatgccacctgcatcgacagcaatgggggcatctgtaatggacgtggccactgtgagtgtggccgctgccactgccaccagcagtcgctctacacggacaccatctgcgagatcaactactcggcgatccacccgggcctctgcgaggacctacgctcctgcgtgcagtgccaggcgtggggcaccggcgagaagaaggggcgcacgtgtgaggaatgcaacttcaaggtcaagatggtggacgagcttaagagagccgaggaggtggtggtgcgctgctccttccgggacgaggatgacgactgcacctacagctacaccatggaaggtgacggcgcccctgggcccaacagcactgtcctggtgcacaagaagaaggactgccctccgggctccttctggtggctcatccccctgctcctcctcctcctgccgctcctggccctgctactgctgctatgctggaagtactgtgcctgctgcaaggcctgcctggcacttctcccgtgctgcaaccgaggtcacatggtgggctttaaggaagaccactacatgctgcgggagaacctgatggcctctgaccacttggacacgcccatgctgcgcagcgggaacctcaagggccgtgacgtggtccgctggaaggtcaccaacaacatgcagcggcctggctttgccactcatgccgccagcatcaaccccacagagctggtgccctacgggctgtccttgcgcctggcccgcctttgcaccgagaacctgctgaagcctgacactcgggagtgcgcccagctgcgccaggaggtggaggagaacctgaacgaggtctacaggcagatctccggtgtacacaagctccagcagaccaagttccggcagcagcccaatgccgggaaaaagcaagaccacaccattgtggacacagtgctgatggcgccccgctcggccaagccggccctgctgaagcttacagagaagcaggtggaacagagggccttccacgacctcaaggtggcccccggctactacaccctcactgcagaccaggacgcccggggcatggtggagttccaggagggcgtggagctggtggacgtacgggtgcccctctttatccggcctgaggatgacgacgagaagcagctgctggtggaggccatcgacgtgcccgcaggcactgccaccctcggccgccgcctggtaaacatcaccatcatcaaggagcaagccagagacgtggtgtcctttgagcagcctgagttctcggtcagccgcggggaccaggtggcccgcatccctgtcatccggcgtgtcctggacggcgggaagtcccaggtctcctaccgcacacaggatggcaccgcgcagggcaaccgggactacatccccgtggagggtgagctgctgttccagcctggggaggcctggaaagagctgcaggtgaagctcctggagctgcaagaagttgactccctcctgcggggccgccaggtccgccgtttccacgtccagctcagcaaccctaagtttggggcccacctgggccagccccactccaccaccatcatcatcagggacccagatgaactggaccggagcttcacgagtcagatgttgtcatcacagccaccccctcacggcgacctgggcgccccgcagaaccccaatgctaaggccgctgggtccaggaagatccatttcaactggctgcccccttctggcaagccaatggggtacagggtaaagtactggattcagggcgactccgaatccgaagcccacctgctcgacagcaaggtgccctcagtggagctcaccaacctgtacccgtattgcgactatgagatgaaggtgtgcgcctacggggctcagggcgagggaccctacagctccctggtgtcctgccgcacccaccaggaagtgcccagcgagccagggcgtctggccttcaatgtcgtctcctccacggtgacccagctgagctgggctgagccggctgagaccaacggtgagatcacagcctacgaggtctgctatggcctggtcaacgatgacaaccgacctattgggcccatgaagaaagtgctggttgacaaccctaagaaccggatgctgcttattgagaaccttcgggagtcccagccctaccgctacacggtgaaggcgcgcaacggggccggctgggggcctgagcgggaggccatcatcaacctggccacccagcccaagaggcccatgtccatccccatcatccctgacatccctatcgtggacgcccagagcggggaggactacgacagcttccttatgtacagcgatgacgttctacgctctccatcgggcagccagaggcccagcgtctccgatgacactggctgcggctggaagttcgagcccctgctgggggaggagctggacctgcggcgcgtcacgtggcggctgcccccggagctcatcccgcgcctgtcggccagcagcgggcgctcctccgacgccgaggcccccacggccccccggacgacggcggcgcgggcgggaagggcggcagccgtgccccgcagtgcgacacccgggccccccggagagcacctggtgaatggccggatggactttgccttcccgggcagcaccaactccctgcacaggatgaccacgaccagtgctgctgcctatggcacccacctgagcccacacgtgccccaccgcgtgctaagcacatcctccaccctcacacgggactacaactcactgacccgctcagaacactcacactcgaccacactgcccagggactactccaccctcacctccgtctcctcccacgactctcgcctgactgctggtgtgcccgacacgcccacccgcctggtgttctctgccctggggcccacatctctcagagtgagctggcaggagccgcggtgcgagcggccgctgcagggctacagtgtggagtaccagctgctgaacggcggtgagctgcatcggctcaacatccccaaccctgcccagacctcggtggtggtggaagacctcctgcccaaccactcctacgtgttccgcgtgcgggcccagagccaggaaggctggggccgagagcgtgagggtgtcatcaccattgaatcccaggtgcacccgcagagcccactgtgtcccctgccaggctccgccttcactttgagcactcccagtgccccaggcccgctggtgttcactgccctgagcccagactcgctgcagctgagctgggagcggccacggaggcccaatggggatatcgtcggctacctggtgacctgtgagatggcccaaggaggagggccagccaccgcattccgggtggatggagacagccccgagagccggctgaccgtgccgggcctcagcgagaacgtgccctacaagttcaaggtgcaggccaggaccactgagggcttcgggccagagcgcgagggcatcatcaccatagagtcccaggatggaggacccttcccgcagctgggcagccgtgccgggctcttccagcacccgctgcaaagcgagtacagcagcatcaccaccacccacaccagcgccaccgagcccttcctagtggatgggctgaccctgggggcccagcacctggaggcaggcggctccctcacccggcatgtgacccaggagtttgtgagccggacactgaccaccagcggaacccttagcacccacatggaccaacagttcttccaaacttgaccgcaccctgccccacccccgccatgtcccactaggcgtcctcccgactcctctcccggagcctcctcagctactccatccttgcacccctgggggcccagcccacccgcatgcacagagcaggggctaggtgtctcctgggaggcatgaagggggcaaggtccgtcctctgtgggcccaaacctatttgtaaccaaagagctgggagcagcacaaggacccagcctttgttctgcacttaataaatggttttgctactgctaaaaaaaaaaaaaaaaaaaaaaaaaaaaaaaaaaaaaaaaaaaaaaaaaaaaaaaaaaaaaaaaaaaaaaaaaaaa

SEQ ID NO: 702 - protein, 386 aa, Homo sapiens
MEELDALLEELERSTLQDSDEYSNPAPLPLDQHSRKETNLDETSEILSIQDNTSPLPAQLVYTTNIQELNVYSEAQEPKESPPPSKTSAAAQLDELMAHLTEMQAKVAVRADAGKKHLPDKQDHKASLDSMLGGLEQELQDLGIATVPKGHCASCQKPIAGKVIHALGQSWHPEHFVCTHCKEEIGSSPFFERSGLAYCPNDYHQLFSPRCAYCAAPILDKVLTAMNQTWHPEHFFCSHCGEVFGAEGFHEKDKKPYCRKDFLAMFSPKCGGCNRPVLENYLSAMDTVWHPECFVCGDCFTSFSTGSFFELDGRPFCELHYHHRRGTLCHGCGQPITGRCISAMGYKFHPEHFVCAFCLTQLSKGIFREQNDKTYCQPCFNKLFPL

SEQ ID NO: 703 - DNA, 1875 bp, Homo sapiens
aaagcatccagttcctttgcggtcctcttcttcagcacatgccaaagctgttcctcacggcctgtgagacaagagcatcttggatgtaggacaatggaagagttagatgccttattggaggaactggaacgctccacccttcaggacagtgatgaatattccaacccagctcctcttcccctggatcagcattccagaaaggagactaaccttgatgagacttcggagatcctttctattcaggataacacaagtcccttgccggcgcagctcgtgtatactaccaatatccaggagctcaatgtctacagtgaagcccaagagccaaaggaatcaccaccaccttctaaaacgtcagcagctgctcagttggatgagctcatggctcacctgactgagatgcaggccaaggttgcagtgagagcagatgctggcaagaagcacttaccagacaagcaggatcacaaggcctccctggactcaatgcttgggggtctggagcaggaattgcaggaccttggcattgccacagtgcccaagggccattgtgcatcctgccagaaaccgattgctgggaaggtgatccatgctctagggcaatcatggcatcctgagcattttgtctgtactcattgcaaagaagagattggctccagtcccttctttgagcggagtggcttggcctactgccccaacgactaccaccaacttttttctccacgctgtgcttactgcgctgctcccatcctggataaagtgctgacagcaatgaaccagacctggcacccagagcacttcttctgctctcactgcggagaggtgtttggtgcagaaggctttcatgagaaggacaagaagccatattgccgaaaggatttcttagccatgttctcacccaagtgtggtggctgcaatcgcccagtgttggaaaactacctttcagccatggacactgtctggcacccagagtgctttgtttgtggggactgcttcaccagtttttctactggctccttctttgaactggatggacgtccattctgtgagctccattaccatcaccgccggggaacgctctgccatgggtgtgggcagcccatcactggccgttgtatcagtgccatggggtacaagttccatcctgagcactttgtgtgtgctttctgcctgacacagttgtcgaagggcattttcagggagcagaatgacaagacctattgtcaaccttgcttcaataagctcttcccactgtaatgccaactgatccatagcctcttcagattccttataaaatttaaaccaagagaggagaggaaagggtaaattttctgttactgaccttctgcttaatagtcttatagaaaaaggaaaggtgatgagcaaataaaggaacttctagactttacatgactaggctgataatcttattttttaggcttctatacagttaattctataaattctctttctccctctcttctccaatcaagcacttggagttagatctaggtccttctatctcgtccctctacagatgtattttccacttgcataattcatgccaacactggttttcttaggtttctccattttcacctctagtgatggccctactcatatcttctctaatttggtcctgatacttgtttcttttcacgttttcccatttgccctgtggctcactgtcttacaatcactgctgtggaatcatgataccacttttagctctttgcatcttccttcagtgtatttttgtttttcaagaggaagtagattttaactggacaactttgagtactgacatcattgataaataaactggcttgtggtttcaataaaaaaaaaaaaaaaaaaaaaaaaaaaaaaaaaaaaaaa

SEQ ID NO: 704 - protein, 770 aa, Homo sapiens
MRGVWPPPVSALLSALGMSTYKRATLDEEDLVDSLSEGDAYPNGLQVNFHSPRSGQRCWAARTQVEKRLVVLVVLLAAGLVACLAALGIQYQTRSPSVCLSEACVSVTSSILSSMDPTVDPCHDFFSYACGGWIKANPVPDGHSRWGTFSNLWEHNQAIIKHLLENSTASVSEAERKAQVYYRACMNETRIEELRAKPLMELIERLGGWNITGPWAKDNFQDTLQVVTAHYRTSPFFSVYVSADSKNSNSNVIQVDQSGLGLPSRDYYLNKTENEKVLTGYLNYMVQLGKLLGGGDEEAIRPQMQQILDFETALANITIPQEKRRDEELIYHKVTAAELQTLAPAINWLPFLNTIFYPVEINESEPIVVYDKEYLEQISTLINTTDRCLLNNYMIWNLVRKTSSFLDQRFQDADEKFMEVMYGTKKTCLPRWKFCVSDTENNLGFALGPMFVKATFAEDSKSIATEIILEIKKAFEESLSTLKWMDEETRKSAKEKADAIYNMIGYPNFIMDPKELDKVFNDYTAVPDLYFENAMRFFNFSWRVTADQLRKAPNRDQWSMTPPMVNAYYSPTKNEIVFPAGILQAPFYTRSSPKALNFGGIGVVVGHELTHAFDDQGREYDKDGNLRPWWKNSSVEAFKRQTECMVEQYSNYSVNGEPVNGRHTLGENIADNGGLKAAYRAYQNWVKKNGAEHSLPTLGLTNNQLFFLGFAQVWCSVRTPESSHEGLITDPHSPSRFRVIGSLSNSKEFSEHFRCPPGSPMNPPHKCEVW

SEQ ID NO: 705 - DNA, 2409 bp, Homo sapiens
atgcggggcgtgtggccgcccccggtgtccgccctgctgtcggcgctggggatgtcgacgtacaagcgggccacgctggacgaggaggacctggtggactcgctctccgagggcgacgcataccccaacggcctgcaggtgaacttccacagcccccggagtggccagaggtgctgggctgcacggacccaggtggagaagcggctggtggtgttggtggtacttctggcggcaggactggtggcctgcttggcagcactgggcatccagtaccagacaagatccccctctgtgtgcctgagcgaagcttgtgtctcagtgaccagctccatcttgagctccatggaccccacagtggacccctgccatgacttcttcagctacgcctgtgggggctggatcaaggccaacccagtccctgatggccactcacgctgggggaccttcagcaacctctgggaacacaaccaagcaatcatcaagcacctcctcgaaaactccacggccagcgtgagcgaggcagagagaaaggcgcaagtatactaccgtgcgtgcatgaacgagaccaggatcgaggagctcagggccaaacctctaatggagttgattgagaggctcgggggctggaacatcacaggtccctgggccaaggacaacttccaggacaccctgcaggtggtcaccgcccactaccgcacctcacccttcttctctgtctatgtcagtgccgattccaagaactccaacagcaacgtgatccaggtggaccagtctggcctgggcttgccctcgagagactattacctgaacaaaactgaaaacgagaaggtgctgaccggatatctgaactacatggtccagctggggaagctgctgggcggcggggacgaggaggccatccggccccagatgcagcagatcttggactttgagacggcactggccaacatcaccatcccacaggagaagcgccgtgatgaggagctcatctaccacaaagtgacggcagccgagctgcagaccttggcacccgccatcaactggttgccttttctcaacaccatcttctaccccgtggagatcaatgaatccgagcctattgtggtctatgacaaggaataccttgagcagatctccactctcatcaacaccaccgacagatgcctgctcaacaactacatgatctggaacctggtgcggaaaacaagctccttccttgaccagcgctttcaggacgccgatgagaagttcatggaagtcatgtacgggaccaagaagacctgtcttcctcgctggaagttttgcgtgagtgacacagaaaacaacctgggctttgcgttgggccccatgtttgtcaaagcaaccttcgccgaggacagcaagagcatagccaccgagatcatcctggagattaagaaggcatttgaggaaagcctgagcaccctgaagtggatggatgaggaaacccgaaaatcagccaaggaaaaggccgatgccatctacaacatgataggataccccaacttcatcatggatcccaaggagctggacaaagtgtttaatgactacactgcagttccagacctctactttgaaaatgccatgcggtttttcaacttctcatggagggtcactgccgatcagctcaggaaagcccccaacagagatcagtggagcatgaccccgcccatggtgaacgcctactactcgcccaccaagaatgagattgtgtttccggccgggatcctgcaggcaccattctacacacgctcctcacccaaggccttaaactttggtggcataggtgtcgtcgtgggccatgagctgactcatgcttttgatgatcaaggacgggagtatgacaaggacgggaacctccggccatggtggaagaactcatccgtggaggccttcaagcgtcagaccgagtgcatggtagagcagtacagcaactacagcgtgaacggggagccggtgaacgggcggcacaccctgggggagaacatcgccgacaacgggggtctcaaggcggcctatcgggcttaccagaactgggtgaagaagaacggggctgagcactcgctccccaccctgggcctcaccaataaccagctcttcttcctgggctttgcacaggtctggtgctccgtccgcacacctgagagctcccacgaaggcctcatcaccgatccccacagcccctctcgcttccgggtcatcggctccctctccaattccaaggagttctcagaacacttccgctgcccacctggctcacccatgaacccgcctcacaagtgcgaagtctggtaaggacgaagcggagagagccaagacggaggaggggaaggggctgaggacgagacccccatccagcctccagggcattgctcagcccgcttggccacc

SEQ ID NO: 706 - protein, 164 aa, Homo sapiens
MSEPAGDVRQNPCGSKACRRLFGPVDSEQLSRDCDALMAGCIQEARERWNFDFVTETPLEGDFAWERVRGLGLPKLYLPTGPRRGRDELGGGRRPGTSPALLQGTAEEDHVDLSLSCTLVPRSGEQAEGSPGGPGDSQGRKRRQTSMTDFYHSKRRLIFSKRKP

SEQ ID NO: 707 - DNA, 2140 bp, Homo sapiens
agctgaggtgtgagcagctgccgaagtcagttccttgtggagccggagctgggcgcggattcgccgaggcaccgaggcactcagaggaggcgccatgtcagaaccggctggggatgtccgtcagaacccatgcggcagcaaggcctgccgccgcctcttcggcccagtggacagcgagcagctgagccgcgactgtgatgcgctaatggcgggctgcatccaggaggcccgtgagcgatggaacttcgactttgtcaccgagacaccactggagggtgacttcgcctgggagcgtgtgcggggccttggcctgcccaagctctaccttcccacggggccccggcgaggccgggatgagttgggaggaggcaggcggcctggcacctcacctgctctgctgcaggggacagcagaggaagaccatgtggacctgtcactgtcttgtacccttgtgcctcgctcaggggagcaggctgaagggtccccaggtggacctggagactctcagggtcgaaaacggcggcagaccagcatgacagatttctaccactccaaacgccggctgatcttctccaagaggaagccctaatccgcccacaggaagcctgcagtcctggaagcgcgagggcctcaaaggcccgctctacatcttctgccttagtctcagtttgtgtgtcttaattattatttgtgttttaatttaaacacctcctcatgtacataccctggccgccccctgccccccagcctctggcattagaattatttaaacaaaaactaggcggttgaatgagaggttcctaagagtgctgggcatttttattttatgaaatactatttaaagcctcctcatcccgtgttctccttttcctctctcccggaggttgggtgggccggcttcatgccagctacttcctcctccccacttgtccgctgggtggtaccctctggaggggtgtggctccttcccatcgctgtcacaggcggttatgaaattcaccccctttcctggacactcagacctgaattctttttcatttgagaagtaaacagatggcactttgaaggggcctcaccgagtgggggcatcatcaaaaactttggagtcccctcacctcctctaaggttgggcagggtgaccctgaagtgagcacagcctagggctgagctggggacctggtaccctcctggctcttgatacccccctctgtcttgtgaaggcagggggaaggtggggtactggagcagaccaccccgcctgccctcatggcccctctgacctgcactggggagcccgtctcagtgttgagccttttccctctttggctcccctgtaccttttgaggagccccagcttacccttcttctccagctgggctctgcaattcccctctgctgctgtccctcccccttgtctttcccttcagtaccctctcatgctccaggtggctctgaggtgcctgtcccacccccacccccagctcaatggactggaaggggaagggacacacaagaagaagggcaccctagttctacctcaggcagctcaagcagcgaccgccccctcctctagctgtgggggtgagggtcccatgtggtggcacaggcccccttgagtggggttatctctgtgttaggggtatatgatgggggagtagatctttctaggagggagacactggcccctcaaatcgtccagcgaccttcctcatccaccccatccctccccagttcattgcactttgattagcagcggaacaaggagtcagacattttaagatggtggcagtagaggctatggacagggcatgccacgtgggctcatatggggctgggagtagttgtctttcctggcactaacgttgagcccctggaggcactgaagtgcttagtgtacttggagtattggggtctgaccccaaacaccttccagctcctgtaacatactggcctggactgttttctctcggctccccatgtgtcctggttcccgtttctccacctagactgtaaacctctcgagggcagggaccacaccctgtactgttctgtgtctttcacagctcctcccacaatgctgaatatacagcaggtgctcaataaatgattcttagtgactttaaaaaaaaaaaaaaaaaaa

SEQ ID NO: 708 - protein, 275 aa, Homo sapiens
MSSFGYRTLTVALFTLICCPGSDEKVFEVHVRPKKLAVEPKGSLEVNCSTTCNQPEVGGLETSLNKILLDEQAQWKHYLVSNISHDTVLQCHFTCSGKQESMNSNVSVYQPPRQVILTLQPTLVAVGKSFTIECRVPTVEPLDSLTLFLFRGNETLHYETFGKAAPAPQEATATFNSTADREDGHRNFSCLAVLDLMSRGGNIFHKHSAPKMLEIYEPVSDSQMVIIVTVVSVLLSLFVTSVLLCFIFGQHLRQQRMGTYGVRAAWRRLPQAFRP

SEQ ID NO: 709 - DNA, 1035 bp, Homo sapiens
atctccctccaggcagcccttggctggtccctgcgagcccgtggagactgccagagatgtcctctttcggttacaggaccctgactgtggccctcttcaccctgatctgctgtccaggatcggatgagaaggtattcgaggtacacgtgaggccaaagaagctggcggttgagcccaaagggtccctcgaggtcaactgcagcaccacctgtaaccagcctgaagtgggtggtctggagacctctctaaataagattctgctggacgaacaggctcagtggaaacattacttggtctcaaacatctcccatgacacggtcctccaatgccacttcacctgctccgggaagcaggagtcaatgaattccaacgtcagcgtgtaccagcctccaaggcaggtcatcctgacactgcaacccactttggtggctgtgggcaagtccttcaccattgagtgcagggtgcccaccgtggagcccctggacagcctcaccctcttcctgttccgtggcaatgagactctgcactatgagaccttcgggaaggcagcccctgctccgcaggaggccacagccacattcaacagcacggctgacagagaggatggccaccgcaacttctcctgcctggctgtgctggacttgatgtctcgcggtggcaacatctttcacaaacactcagccccgaagatgttggagatctatgagcctgtgtcggacagccagatggtcatcatagtcacggtggtgtcggtgttgctgtccctgttcgtgacatctgtcctgctctgcttcatcttcggccagcacttgcgccagcagcggatgggcacctacggggtgcgagcggcttggaggaggctgccccaggccttccggccatagcaaccatgagtggcatggccaccaccacggtggtcactggaactcagtgtgactcctcagggttgaggtccagccctggctgaaggactgtgacaggcagcagagacttgggacattgccttttctagcccgaatacaaacacctggactt

SEQ ID NO: 710 - protein, 275 aa, Homo sapiens
MSSFGYRTLTVALFTLICCPGSDEKVFEVHVRPKKLAVEPKGSLEVNCSTTCNQPEVGGLETSLDKILLDEQAQWKHYLVSNISHDTVLQCHFTCSGKQESMNSNVSVYQPPRQVILTLQPTLVAVGKSFTIECRVPTVEPLDSLTLFLFRGNETLHYETFGKAAPAPQEATATFNSTADREDGHRNFSCLAVLDLMSRGGNIFHKHSAPKMLEIYEPVSDSQMVIIVTVVSVLLSLFVTSVLLCFIFGQHLRQQRMGTYGVRAAWRRLPQAFRP

SEQ ID NO: 711 - DNA, 397 bp, Homo sapiens
cttgccccctccctccccagagcctgtgtcggacagccagatggtcatcatagtcacggtggtgtcggtgttgctgtccctgttcgtgacatctgtcctgctctgcttcatcttcggccagcacttgcgccagcagcggatgggcacctacggggtgcgagcggcttggaggaggctgccccaggccttccggccatagcaaccatgagtggcatggccaccaccacggtggtcactggaactcagtgtgactcctcagggttgaggtccagccctggctgaaggactgtgacaggcagcagagacttgggacattgccttttctagcccgaatacaaacacctggacttagccctgtgcccacagtgtctcctcctgggataacaatggccaggga

SEQ ID NO: 712 - protein, 351 aa, Homo sapiens
MPGSAAKGSELSERIESFVETLKRGGGPRSSEEMARETLGLLRQIITDHRWSNAGELMELIRREGRRMTAAQPSETTVGNMVRRVLKIIREEYGRLHGRSDESDQQESLHKLLTSGGLNEDFSFHYAQLQSNIIEAINELLVELEGTMENIAAQALEHIHSNEVIMTIGFSRTVEAFLKEAARKRKFHVIVAECAPFCQGHEMAVNLSKAGIETTVMTDAAIFAVMSRVNKVIIGTKTILANGALRAVTGTHTLALAAKHHSTPLIVCAPMFKLSPQFPNEEDSFHKFVAPEEVLPFTEGDILEKVSVHCPVFDYVPPELITLFISNIGGNAPSYIYRLMSELYHPDDHVL

SEQ ID NO: 713 - DNA, 1522 bp, Homo sapiens
caggtgtggattccgccggtgaaggctgaaggcagctaccttaaagatgccgggatccgcagcgaagggctcggagttgtcagagaggatcgagagcttcgtggagaccctgaagcggggtggtgggccgcgcagctccgaggaaatggctcgggagaccctagggttgctgcgccagatcatcacggaccaccgctggagcaacgcgggggagctgatggagctgatccgcagagagggcaggaggatgacggccgctcagccctccgagaccaccgtgggcaacatggtgcggagagtgctcaagattatccgggaggagtatggcagactccatggacgcagcgacgagagtgatcagcaggagtccctgcacaaactgttgacatccggaggcctaaacgaggatttcagcttccattatgcccaactccagtccaacatcattgaggcgattaatgagctgctagtggagctggaagggacaatggagaacattgcagcccaggctctggagcacattcactccaatgaggtgatcatgaccattggcttctcccgaacagtagaggccttcctcaaagaggctgcccgaaagaggaaattccatgtcattgtagcagagtgtgctcctttctgccagggtcatgaaatggctgtgaatttgtccaaagcaggtattgagacaactgtcatgactgatgctgccatttttgccgttatgtcaagagtcaacaaggtgatcattggcacgaagaccatcctggccaatggggccctgagagctgtgacaggaactcacactctggcactggcagcaaaacaccattccaccccactcatcgtctgtgcacctatgttcaaactttctccacagttccccaatgaagaagactcatttcataagtttgtggctcctgaagaagtcctgccattcacagaaggggacattctggagaaggtcagcgtgcattgccctgtgtttgactacgttcccccagagctcattaccctctttatctccaacattggtgggaatgcaccttcctacatctaccgcctgatgagtgaactctaccatcctgatgatcatgttttatgaccgaccacacgtgtcctaagcagattgcttaggcagatacagaatgaagaggagacttgagtgttgctgctgaagcacatccttgcaatgtgggagtgcacaggagtccacctaaaaaaaaaatccttgatactgttgcctgcctttttagtcaccccgtaacaagggcacacatccagcactgtgtcttgcctttcagatcttaacagagcagcagggcttaacttgttgattttggagcctcttagtgacctggttgcgtctgtgtcaggaacttaaactttctggttcagtagtgtgttaaacataacactgaataccttactgggatacagatttttgctcagaaatggctatgacactttttctaggctctaccaataaaagccacttgaaggttcaaaaaaaaaaaaaaaaaaa

SEQ ID NO: 714 - protein, 310 aa, Homo sapiens
MAATGANAEKAESHNDCPVRLLNPNIAKMKEDILYHFNLTTSRHNFPALFGDVKFVCVGGSPSRMKAFIRCVGAELGLDCPGRDYPNICAGTDRYAMYKVGPVLSVSHGMGIPSISIMLHELIKLLYYARCSNVTIIRIGTSGGIGLEPGTVVITEQAVDTCFKAEFEQIVLGKRVIRKTDLNKKLVQELLLCSAELSEFTTVVGNTMCTLDFYEGQGRLDGALCSYTEKDKQAYLEAAYAAGVRNIEMESSVFAAMCSACGLQAAVVCVTLLNRLEGDQISSPRNVLSEYQQRPQRLVSYFIKKKLSKA

SEQ ID NO: 715 - DNA, 1349 bp, Homo sapiens
attcgagtgctccggagaacagacccgcgccccgccgtccgcgagcctcccgagagccgtcccttcgtccggccctggagcattgcgtttgtcgccggtgtcgcagtgcgaggatggcgccgcgggtgtagcggctctctgcgcaggccgagtgggcccagagaagcgaggaactccccagatcgccgacacgtctcgtctcctgtcccaattcagggcttggtgaggtgactcgcggtcgcgggtgactcgccggcaggacactgcctggaacgcctggagcgcctcccactgcagacgtctgtccgcctccagccgctctcctctgacgggtcctgcctcagttggcggaatggcggccacgggagccaatgcagagaaagctgaaagtcacaatgattgccccgtcagacttttaaatccaaacatagcaaaaatgaaagaagatattctctatcatttcaatctcaccactagcagacacaatttcccagccttgtttggagatgtgaagtttgtgtgtgttggtggaagcccctcccggatgaaagccttcatcaggtgcgttggtgcagagctgggccttgactgcccaggtagagactatcccaacatctgtgcgggaactgaccgctatgccatgtataaagtaggaccggtgctgtctgtcagtcatggtatgggcattccttctatctcaatcatgttgcatgagctcataaagctgctgtactatgcccggtgctccaacgtcactatcatccgcattggcacttctggtgggataggtctggagcccggcactgtggtcataacagagcaggcagtggatacctgcttcaaggcagagtttgagcagattgtcctggggaagcgggtcatccggaaaacggaccttaacaagaagctggtgcaggagctgttgctgtgttctgcagagctgagcgagttcaccacagtggtggggaacaccatgtgcaccttggacttctatgaagggcaaggccgtctggatggggctctctgctcctacacggagaaggacaagcaggcgtatctggaggcagcctatgcagccggcgtccgcaatatcgagatggagtcctcggtgtttgccgccatgtgcagcgcctgcggcctccaagcggccgtggtgtgtgtcaccctcctgaaccgcctggaaggggaccagatcagcagccctcgcaatgtgctcagcgagtaccagcagaggccgcagcggctggtgagctacttcatcaagaagaaactgagcaaggcctgagcgctgccctgcacctccgcagacctgctgtgatgacttgccattaaaagcattgtccaaaccc

SEQ ID NO: 716 - protein, 799 aa, Homo sapiens
MPRAPAPLYACLLGLCALLPRLAGLNICTSGSATSCEECLLIHPKCAWCSKEDFGSPRSITSRCDLRANLVKNGCGGEIESPASSFHVLRSLPLSSKGSGSAGWDVIQMTPQEIAVNLRPGDKTTFQLQVRQVEDYPVDLYYLMDLSLSMKDDLDNIRSLGTKLAEEMRKLTSNFRLGFGSFVDKDISPFSYTAPRYQTNPCIGYKLFPNCVPSFGFRHLLPLTDRVDSFNEEVRKQRVSRNRDAPEGGFDAVLQAAVCKEKIGWRKDALHLLVFTTDDVPHIALDGKLGGLVQPHDGQCHLNEANEYTASNQMDYPSLALLGEKLAENNINLIFAVTKNHYMLYKNFTALIPGTTVEILDGDSKNIIQLIINAYNSIRSKVELSVWDQPEDLNLFFTATCQDGVSYPGQRKCEGLKIGDTASFEVSLEARSCPSRHTEHVFALRPVGFRDSLEVGVTYNCTCGCSVGLEPNSARCNGSGTYVCGLCECSPGYLGTRCECQDGENQSVYQNLCREAEGKPLCSGRGDCSCNQCSCFESEFGKIYGPFCECDNFSCARNKGVLCSGHGECHCGECKCHAGYIGDNCNCSTDISTCRGRDGQICSERGHCLCGQCQCTEPGAFGEMCEKCPTCPDACSTKRDCVECLLLHSGKPDNQTCHSLCRDEVITWVDTIVKDDQEAVLCFYKTAKDCVMMFTYVELPSGKSNLTVLREPECGNTPNAMTILLAVVGSILLVGLALLAIWKLLVTIHDRREFAKFQSERSRARYEMASNPLYRKPISTHTVDFTFNKFNKSYNGTVD

SEQ ID NO: 717 - DNA, 3401 bp, Homo sapiens
ggcacgagggcggagccagcccctcccctacccggagcagcccgctggggccgtcccgagcggcgacacactaggagtcccggccggccagccagggcagccgcggtcccgggactcggccgtgagtgctgcgggacggatggtggcggcggggcgcgggccagcgcgggcgccgtgagccggagctgcgcgcggggcatgcggctgcggcccccggccctcggcccccgcgctccggccccagccccggccgccggcccccgcggagtgcagcgaccgcgccgccgctgagggaggcgccccaccatgccgcgggccccggcgccgctgtacgcctgcctcctggggctctgcgcgctcctgccccggctcgcaggtctcaacatatgcactagtggaagtgccacctcatgtgaagaatgtctgctaatccacccaaaatgtgcctggtgctccaaagaggacttcggaagcccacggtccatcacctctcggtgtgatctgagggcaaaccttgtcaaaaatggctgtggaggtgagatagagagcccagccagcagcttccatgtcctgaggagcctgcccctcagcagcaagggttcgggctctgcaggctgggacgtcattcagatgacaccacaggagattgccgtgaacctccggcccggtgacaagaccaccttccagctacaggttcgccaggtggaggactatcctgtggacctgtactacctgatggacctctccctgtccatgaaggatgacttggacaatatccggagcctgggcaccaaactcgcggaggagatgaggaagctcaccagcaacttccggttgggatttgggtcttttgttgataaggacatctctcctttctcctacacggcaccgaggtaccagaccaatccgtgcattggttacaagttgtttccaaattgcgtcccctcctttgggttccgccatctgctgcctctcacagacagagtggacagcttcaatgaggaagttcggaaacagagggtgtcccggaaccgagatgcccctgaggggggctttgatgcagtactccaggcagccgtctgcaaggagaagattggctggcgaaaggatgcactgcatttgctggtgttcacaacagatgatgtgccccacatcgcattggatggaaaattgggaggcctggtgcagccacacgatggccagtgccacctgaacgaggccaacgagtacactgcatccaaccagatggactatccatcccttgccttgcttggagagaaattggcagagaacaacatcaacctcatctttgcagtgacaaaaaaccattatatgctgtacaagaattttacagccctgatacctggaacaacggtggagattttagatggagactccaaaaatattattcaactgattattaatgcatacaatagtatccggtctaaagtggagttgtcagtctgggatcagcctgaggatcttaatctcttctttactgctacctgccaagatggggtatcctatcctggtcagaggaagtgtgagggtctgaagattggggacacggcatcttttgaagtatcattggaggcccgaagctgtcccagcagacacacggagcatgtgtttgccctgcggccggtgggattccgggacagcctggaggtgggggtcacctacaactgcacgtgcggctgcagcgtggggctggaacccaacagtgccaggtgcaacgggagcgggacctatgtctgcggcctgtgtgagtgcagccccggctacctgggcaccaggtgcgagtgccaggatggggagaaccagagcgtgtaccagaacctgtgccgggaggcagagggcaagccactgtgcagcgggcgtggggactgcagctgcaaccagtgctcctgcttcgagagcgagttcggcaagatctatgggcctttctgtgagtgcgacaacttctcctgtgccaggaacaagggagtcctctgctcaggccatggcgagtgtcactgcggggaatgcaagtgccatgcaggttacatcggggacaactgtaactgctcgacagacatcagcacatgccggggcagagatggccagatctgcagcgagcgtgggcactgtctctgtgggcagtgccaatgcacggagccgggggcctttggggagatgtgtgagaagtgccccacctgcccggatgcatgcagcaccaagagagattgcgtcgagtgcctgctgctccactctgggaaacctgacaaccagacctgccacagcctatgcagggatgaggtgatcacatgggtggacaccatcgtgaaagatgaccaggaggctgtgctatgtttctacaaaaccgccaaggactgcgtcatgatgttcacctatgtggagctccccagtgggaagtccaacctgaccgtcctcagggagccagagtgtggaaacacccccaacgccatgaccatcctcctggctgtggtcggtagcatcctccttgttgggcttgcactcctggctatctggaagctgcttgtcaccatccacgaccggagggagtttgcaaagtttcagagcgagcgatccagggcccgctatgaaatggcttcaaatccattatacagaaagcctatctccacgcacactgtggacttcaccttcaacaagttcaacaaatcctacaatggcactgtggactgatgtttccttctccgaggggctggagcggggatctgatgaaaaggtcagactgaaacgccttgcacggctgctcggcttgatcacagctccctaggtaggcaccacagagaagaccttctagtgagcctgggccaggagcccacagtgcctgtacaggaaggtgcctggccatgtcacctggctgctaggccagagccatgccaggctgcgtccctccgagcttgggataaagcaaggggaccttggcactctcagctttccctgccacatccagcttgttgtcccaatgaaatactgagatgctgggctgtctctcccttccaggaatgctgggcccccagcctggccagacaagacgactgtcaggaagggtcggagtctgtaaaaccagcatacagtttggcttttttcacattgatcatttttatatgaaataaaaagatcctgcatttatggtgtagttctgagtcctgagacttttccgcgtgatggctatgccttgcacacaggtgttggtgatggggctgttgagatgcctgttgaaggtacatcgtttgcaaatgtcagtttcctctcctgtccgtgtttgtttagtacttttataatgaaaagaaacaagattgtttgggattggaagtaaagattaaaaccaaaagaatttgtgtttgtctgataaaaaaaaaaaaaaaaaaaaa

SEQ ID NO: 718 - protein, 502 aa, Homo sapiens
MSCPVPACCALLLVLGLCRARPRNALLLLADDGGFESGAYNNSAIATPHLDALARRSLLFRNAFTSVSSCSPSRASLLTGLPQHQNGMYGLHQDVHHFNSFDKVRSLPLLLSQAGVRTGIIGKKHVGPETVYPFDFAYTEENGSVLQVGRNITRIKLLVRKFLQTQDDRPFFLYVAFHDPHRCGHSQPQYGTFCEKFGNGESGMGRIPDWTPQAYDPLDVLVPYFVPNTPAARADLAAQYTTVGRMDQGVGLVLQELRDAGVLNDTLVIFTSDNGIPFPSGRTNLYWPGTAEPLLVSSPEHPKRWGQVSEAYVSLLDLTPTILDWFSIPYPSYAIFGSKTIHLTGRSLLPALEAEPLWATVFGSQSHHEVTMSYPMRSVQHRHFRLVHNLNFKMPFPIDQDFYVSPTFQDLLNRTTAGQPTGWYKDLRHYYYRARWELYDRSRDPHETQNLATDPRFAQLLEMLRDQLAKWQWETHDPWVCAPDGVLEEKLSPQCQPLHNEL

SEQ ID NO: 719 - DNA, 2657 bp, Homo sapiens
gaattccgggccatgagctgccccgtgcccgcctgctgcgcgctgctgctagtcctggggctctgccgggcgcgtccccggaacgcactgctgctcctcgcggatgacggaggctttgagagtggcgcgtacaacaacagcgccatcgccaccccgcacctggacgccttggcccgccgcagcctcctctttcgcaatgccttcacctcggtcagcagctgctctcccagccgcgccagcctcctcactggcctgccccagcatcagaatgggatgtacgggctgcaccaggacgtgcaccacttcaactccttcgacaaggtgcggagcctgccgctgctgctcagccaagctggtgtgcgcacaggcatcatcgggaagaagcacgtggggccggagaccgtgtacccgtttgactttgcgtacacggaggagaatggctccgtcctccaggtggggcggaacatcactagaattaagctgctcgtccggaaattcctgcagactcaggatgaccggcctttcttcctctacgtcgccttccacgacccccaccgctgtgggcactcccagccccagtacggaaccttctgtgagaagtttggcaacggagagagcggcatgggtcgtatcccagactggaccccccaggcctacgacccactggacgtgctggtgccttacttcgtccccaacaccccggcagcccgagccgacctggccgctcagtacaccaccgtcggccgcatggaccaaggagttggactggtgctccaggagctgcgtgacgccggtgtcctgaacgacacactggtgatcttcacgtccgacaacgggatccccttccccagcggcaggaccaacctgtactggccgggcactgctgaacccttactggtgtcatccccggagcacccaaaacgctggggccaagtcagcgaggcctacgtgagcctcctagacctcacgcccaccatcttggattggttctcgatcccgtaccccagctacgccatctttggctcgaagaccatccacctcactggccggtccctcctgccggcgctggaggccgagcccctctgggccaccgtctttggcagccagagccaccacgaggtcaccatgtcctaccccatgcgctccgtgcagcaccggcacttccgcctcgtgcacaacctcaacttcaagatgccctttcccatcgaccaggacttctacgtctcacccaccttccaggacctcctgaaccgcaccacagctggtcagcccacgggctggtacaaggacctccgtcattactactaccgggcgcgctgggagctctacgaccggagccgggacccccacgagacccagaacctggccaccgacccgcgctttgctcagcttctggagatgcttcgggaccagctggccaagtggcagtgggagacccacgacccctgggtgtgcgcccccgacggcgtcctggaggagaagctctctccccagtgccagcccctccacaatgagctgtgaccatcccaggaggcctgtgcacacatcccaggcatgtcccagacacatcccacacgtgtccgtgtggccggccagcctggggagtagtggcaacagcccttccgtccacactcccatccaaggagggttcttccttcctgtggggtcactcttgccattgcctggagggggaccagagcatgtgaccagagcatgtgcccagcccctccaccaccaggggcactgccgtcatggcaggggacacagttgtccttgtgtctgaaccatgtcccagcacgggaattctagacatacgtggtctgcggacagggcagcgcccccagcccatgacaagggagtcttgttttctggcttggtttggggacctgcaaatgggaggcctgaggccctcttcaggctttggcagccacagatacttctgaacccttcacagagagcaggcaggggcttcggtgccgcgtgggcagtacgcaggtcccaccgacactcacctgggagcacggcgcctggctcttaccagcgtctggcctagaggaagcctttgagcgacctttgggcaggtttctgcttcttctgttttgcccatggtcaagtccctgttccccaggcaggtttcagctgattggcagcaggctccctgagtgatgagcttgaacctgtggtgtttctgggcagaagcttatcttttttgagagtgtccgaagatgaaggcatggcgatgcccgtcctctggcttgggttaattcttcggtgacactggcattgctgggtggtgatgcccgtcctctggcttgggttaattcttcggtgacactggcgttgctgggtggcaatgcccgtcctctggcttgggttaattcttcggtgacactggcgttgctgggtggcgatgcccgtcctctggcttgggttaattcttggatgacgtcggcgttgctgggagaatgtgccgttcctgccctgcctccacccacctcgggagcagaagcccggcctggacacccctcggcctggacacccctcgaaggagagggcgcttccttgagtaggtgggctccccttgcccttccctccctatcactccatactggggtgggctggaggaggccacaggccagctattgtaaaagcttttt

SEQ ID NO: 720 - protein, 1443 aa, Homo sapiens
YGKLTDAYGCLGELRLKSGGTSLSFLVLVTGCTSVGRIPDAEIYKITATDFYPLQEEAKEEERLIALKKILSSGVFYFSWPNDGSRFDLTVRTQKQGDDSSEWGNSFFWNQLLHVPLRQHQVSCCDWLLKIICGVVTIRTVYASHKQAKACLVSRVSCERTGTRFHTRGVNDDGHVSNFVETEQMIYMDDGVSSFVQIRGSVPLFWEQPGLQVGSHHLRLHRGLEANAPAFDRHMVLLKEQYGQQVVVNLLGSRGGEEVLNRAFKKLLWASCHAGDTPMINFDFHQFAKGGKLEKLETLLRPQLKLHWEDFDVFTKGENVSPRFQKGTLRMNCLDCLDRTNTVQSFIALEVLHLQLKTLGLSSKPIVDRFVESFKAMWSLNGHSLSKVFTGSRALEGKAKVGKLKDGARSMSRTIQSNFFDGVKQEAIKLLLVGDVYGEEVADKGGMLLDSTALLVTPRILKAMTERQSEFTNFKRIRIAMGTWNVNGGKQFRSNVLRTAELTDWLLDSPQLSGATDSQDDSSPADIFAVGFEEMVELSAGNIVNASTTNKKMWGEQLQKAISRSHRYILLTSAQLVGVCLYIFVRPYHVPFIRDVAIDTVKTGMGGKAGNKGAVGIRFQFHSTSFCFICSHLTAGQSQVKERNEDYKEITQKLCFPMGRNVFSHDYVFWCGDFNYRIDLTYEEVFYFVKRQDWKKLLEFDQLQLQKSSGKIFKDFHEGAINFGPTYKYDVGSAAYDTSDKCRTPAWTDRVLWWRKKHPFDKTAGELNLLDSDLDVDTKVRHTWSPGALQYYGRAELQASDHRPVLAIVEVEVQEVDVGARERVFQEVSSFQGPLDATVVVNLQSPTLEEKNEFPEDLRTELMQTLGSYGTIVLVRINQGQMLVTFADSHSALSVLDVDGMKVKGRAVKIRPKTKDWLKGLREEIIRKRDSMAPVSPTANSCLLEENFDFTSLDYESEGDILEDDEDYLVDEFNQPGVSDSELGGDDLSDVPGPTALAPPSKSPALTKKKQHPTYKDDADLVELKRELEAVGEFRHRSPSRSLSVPNRPRPPQPPQRPPPPTGLMVKKSASDASISSGTHGQYSILQTARLLPGAPQQPPKARTGISKPYNVKQIKTTNAQEAEAAIRCLLEARGGASEEALSAVAPRDLEASSEPEPTPGAAKPETPQAPPLLPRRPPPRVPAIKKPTLRRTGKPLSPEEQFEQQTVHFTIGPPETSVEAPPVVTAPRVPPVPKPRTFQPGKAAERPSHRKPASDEAPPGAGASVPPPLEAPPLVPKVPPRRKKSAPAAFHLQVLQSNSQLLQGLTYNSSDSPSGHPPAAGTVFPQGDFLSTSSATSPDSDGTKAMKPEAAPLLGDYQDPFWNLLHHPKLLNNTWLSKSSDPLDSGTRSPKRDPIDPVSAGASAAKAELPPDHEHKTLGHWVTISDQEKRTALQVFDPLAKT

SEQ ID NO: 721 - DNA, 6505 bp, Homo sapiens
gtatggcaagctcacggacgcgtacggctgcctgggggagctgaggctgaaatctggtggcacgtctctgagcttcctggtgttggtgacaggctgcacatctgtgggcagaattccagatgctgaaatctacaaaatcactgccactgacttttaccctcttcaggaagaggccaaggaggaggaacgcctcatagctttgaagaaaatcctcagctcgggggtgttctatttctcatggccaaacgatgggtctcgctttgacctgactgtccgcacgcagaagcagggggatgacagctctgaatgggggaactccttcttctggaaccagctgttgcacgtgcccttgaggcagcaccaggtgagctgctgtgactggctgctgaagatcatctgcggggtggtcaccatccgcaccgtgtatgcctcccacaagcaggccaaggcctgcctcgtctctcgcgttagctgtgagcgcacaggcactcgcttccacacccgtggcgtgaacgacgacggccatgtgtccaacttcgtggagacagagcagatgatttacatggacgatggagtgtcatcttttgtccagatcagaggctccgttccgctgttctgggaacagccagggcttcaggttggctcccatcatctgagactccacagaggcctggaagccaatgcccctgctttcgacaggcacatggtgcttctgaaggagcagtacgggcagcaggtggtcgtgaaccttctgggaagcagaggcggagaggaggtgctcaacagagccttcaagaagctgctctgggcttcttgccacgcgggcgacacgcctatgatcaattttgacttccatcagtttgccaaaggtgggaagctagagaaattggagaccctcttgaggccacagttaaagctgcactgggaagacttcgatgtgttcacaaagggggagaacgtcagtccacgttttcagaaaggcactttgcggatgaactgtcttgactgcctggaccgaaccaacactgtgcagagcttcatcgcgctcgaggtcctgcatctgcagctcaagaccctggggctgagttcaaaacccatcgttgaccgctttgtggagtccttcaaagccatgtggtctctgaatggccacagcctgagcaaggtgttcacaggcagcagagccctggaagggaaggccaaggtggggaagctgaaggatggagcccggtccatgtctcgaaccatccagtccaacttcttcgacggggtgaagcaggaggccatcaagctgctgctggttggggacgtctacggcgaggaggtggcagacaaagggggcatgctgctggacagcacggcgctcctggtgactcccaggatcctgaaagctatgactgagcgtcagtccgaattcacaaatttcaagcggatccggattgctatggggacctggaacgtgaacggaggaaagcagttccggagcaacgtgctcaggacggcggagctgacagactggctgctcgactcgccccagctctcgggagctaccgactcccaggatgacagcagcccagctgacatatttgctgtggggtttgaagagatggtggaattgagcgcagggaatattgtcaatgccagtactaccaacaagaagatgtggggtgaacagcttcagaaagccatctcacgctctcatagatacattctgttgacttcggcacagctggtgggcgtctgtctttatatctttgtacgtccataccatgtcccgttcatcagggacgtagccatcgacacagtgaagacgggcatggggggcaaggcggggaacaagggcgccgtcggcatccgcttccagttccacagcaccagcttctgcttcatatgtagtcacctgacggccgggcagtcccaggtgaaggagcggaatgaagactacaaggagatcacccagaaactctgcttcccaatggggagaaatgttttttctcatgattatgtattttggtgtggcgatttcaactaccgcattgatcttacttatgaagaagtcttctattttgttaaacgccaagactggaagaaacttctggaatttgatcaactacagctacagaaatcaagtggaaaaatttttaaggactttcacgaaggagccattaactttggacccacctacaagtatgacgttggctcagccgcctacgatacaagcgacaaatgccgcacccccgcctggacagacagggtgctgtggtggaggaagaaacatccctttgataaaacagctggagaactcaaccttctagacagtgatctagatgttgacaccaaagtcagacacacctggtctcctggtgccctgcagtattatggtcgtgcggagctacaagcgtctgatcacagacctgtgctggcgatcgtggaggtggaagttcaggaagtcgatgtgggtgctcgggagagggttttccaggaagtgtcctccttccagggccccctggatgccactgttgtagtaaaccttcaatcaccgaccttagaagagaaaaacgagtttccagaggacctgcgtactgagctcatgcagaccttggggagttatgggacaattgttcttgtcaggatcaaccaagggcagatgctggtaacttttgcagacagtcactcggctctcagtgtcctggacgtggacggtatgaaggtgaaaggcagagcagtgaagattagaccgaagaccaaggactggctgaaaggtttgcgagaggagatcattcggaaacgagacagcatggcccccgtgtctcccactgccaactcctgtttgctggaggaaaactttgacttcacaagtttggactatgagtcagaaggggatattcttgaagacgatgaagactacttggtggatgaattcaatcagcctggagtctcggacagtgaactcgggggagacgacctctctgatgtccccggccccacagcactggctcctcccagcaagtcacctgctctcaccaaaaagaagcagcatccaacgtacaaagatgacgcggacctggtggagctcaagcgggagctggaagccgtcggggagttccgccaccgttctccgagcaggtctctgtcggtccccaaccggcctcggccacctcaacccccgcagagacccccccctccaaccggtttaatggtgaaaaagtcggcttcagatgcgtccatctcctccggcacccatggacagtattcaattttgcagacggcaagacttctaccaggagcacctcagcaacctcccaaggctcggactggaataagtaaaccttataatgtcaagcagatcaaaaccaccaatgcccaggaggcagaagcagcaatccggtgtctcctggaagccagaggaggtgcctccgaagaagccctaagtgccgtggccccaagggaccttgaagcatcctctgaaccagagcccacaccgggggcagccaaaccagagaccccacaggcgcccccactccttccccgtcggcccccacccagagttcctgccatcaagaagccaaccttgagaaggacaggaaagcccctgtcaccggaagaacagtttgagcaacagactgtccattttacaatcgggcccccggagacaagcgttgaggcccctcctgtcgtgacagcccctcgagtccctcctgttcccaaaccaagaacatttcagcctgggaaagctgcagagaggccaagccacaggaagccagcatcagacgaagcccctcctggggcaggagcctctgtgccaccacctctggaggcgccgcctcttgtgcccaaggtacccccgaggaggaagaagtcagcccccgcagccttccacctgcaggtcctgcagagcaacagccagcttctccagggcctcacttacaatagcagtgacagcccctctgggcacccacctgccgcgggcaccgtcttcccacaaggggactttctcagcacttcatctgctacaagccccgacagcgatggcaccaaagcgatgaagccagaggcagccccacttcttggtgattatcaggaccccttctggaaccttcttcaccaccctaaactgttgaataacacttggctttctaagagctcagaccctttggactcaggaaccaggagccccaaaagagatcccatagacccagtgtcagctggcgcttcagctgccaaggcagagctgccaccagatcatgaacacaaaaccttaggtcactgggtgacaatcagtgaccaagaaaagaggacagcactgcaggtgtttgacccactggcaaaaacatgactgagcagctttgaaggctgcagtcctatagaatgcataccttcctccctctagacatccctccaccagaagagacatctatttaaaggcacactggccaaaacgtttgtgcatctgtcactctcgtgtagtttacaaaaatcgtgtctcttattcagtaagatggttactcagccaccaaaatatatttcactcaaggcttgtacatctgaagtttgctcttcaaggaatgggaaccttcctgttaaattcggtgtatggattttaagaaaggaatctagccaatgaggtccaagaagttctcacccattgaatttttaaatggctgttcagttcatgttgtacgtgatggagatttgtcttttgttttatttgcattttacagatttggtataacattttggggagccacctgaaggttgatgtataaagtaaggattagagaaagaggtcgttgtgaccattaatagctgtcctggcccacttaaacaaggttacaaaaaatcagagtcggaagcagccaaataggtcaacctaatgactagactgtacattcccatgagccttcatgtttaagtgtgtacatgtgcgttaaccttgatgatgcgtgaatcccgagggagccggtggcatacaccgttagcttaaccttagcttaaactagctgaaggctcctgtgccatgtcttagacattgcatgccctatcaattactataatcctgagccatggtgtgctactgaaaccaatttttatccaccatctagtccttattaaatgaaacctcacggatcctttgttccgcttatattccatgcataccacataaaagcacacagtgcgaaaactcttgctgatacgcgatattgattctcattgttagaatatggagagtgtttcagcctcgtctgtccggctggagcttcgggatggaaagtgctatgtgtccctgcatataagaatcaccaggccagtgtttctgggtttgcttgtctatatgtttgtctatattttttgcctatacatttttcccacgtttccaacagcacttctcacctattcaataactgaaaaagacattaccatagtgctttacatttttaaagtaatgttacaaggtctggaatccatttggagcagataccgtgttttcgctatttaataagaagttcagtagtgaaatcttactgtaccgcctgttgtatctgggagcctcgtacagaggctcgcacagcagtgatcaagtgtcatcccttacgtgactgggggatgtctgtcctaaaagctgactgctaggatagtaaggatcatcttgcctgggctatgccactgtcttgttaccaattagacatctggaatttcataattagttttcattgtcactgtcaagatatattgcagattacttaaatatggccatcaaaacaaaagttacaacacgtatctcttttcatctgaaaactaatacctggaaaaggataaaaaaaaaaaggaatccgtgacccacagagctagacagataagatgcatagttgaccagtcataaaaggcggtgtttaagtgatcaggatgccgttggtggcatttacgtgctttatatgatttttacctctgtaacaaacacaagaaataaacagaatggtccttaacagagtttgggggagagagcaagatgggttccttggagaagctgatttgccaagatgcacatcgctattaacagccagagtcataaatgaaatgaaattgaagaattcattcaaatgctcttttccctataacctcttttctcaccaaaaaggagataaatttgaaaacagataaatgtaacaaccagtcaaagaagcaggggaaaagtaagctcctccaaagttgcttgcagtgctggaaatagatctcatttttaggttttctcttcgttccagataccaaataaatgggacagagaataaaatttttgttaaaatatgtgctcatctcctaagtagctcttcagagtctgaccgtaagtaaaaacacacagaattgtgttgactgggggaggtgaatcacaaaaaagttacgaggagtttaagagttaaatattatttgatcgtggctgtcaaatttagtgaacaacatagattggatttggagttggtagtaagtatggttctcataccagaattctctt

SEQ ID NO: 722 - protein, 61 aa, Homo sapiens
MDPNCSCSPVGSCACAGSCKCKECKCTSCKKSCCSCCPVGCAKCAQGCICKGTSDKCSCCA

SEQ ID NO: 723 - DNA, 415 bp, Homo sapiens
ccgctgcgtgttttcctcttgatcgggaactcctgcttctccttgcctcgaaatggaccccaactgctcctgctcgcctgttggctcctgtgcctgtgccggctcctgcaaatgcaaagagtgcaaatgcacctcctgcaagaagagctgctgctcctgctgccctgtgggctgtgcmaagtgtgcccagggctgcatctgcaaagggacgtcagacaagtgcagctgctgtgcctgatgccaggacagctgtgctctcagatgtaaatagagcaacctatataaacctggatttttttttttttttttttgtacaaccctgacccgtttgctacatctttttttctatgaaatatgtgaatggcaataaattcatctagactaaaaaaaaaaaaaaaaaaaaaaaaaaaaaaaa

SEQ ID NO: 724 - protein, 348 aa, Homo sapiens
MYTAIPQSGSPFPGSVQDPGLHVWRVEKLKPVPVAQENQGVFFSGDSYLVLHNGPEEVSHLHLWIGQQSSRDEQGACAVLAVHLNTLLGERPVQHREVQGNESDLFMSYFPRGLKYQEGGVESAFHKTSTGAPAAIKKLYQVKGKKNIRATERALNWDSFNTGDCFILDLGQNIFAWCGGKSNILERNKARDLALAIRDSERQGKAQVEIVTDGEEPAEMIQVLGPKPALKEGNPEEDLTADKANAQAAALYKVSDATGQMNLTKVADSSPFALELLISDDCFVLDNGLCGKIYIWKGRKANEKERQAALQVAEGFISRMQYAPNTQVEILPQGRESPIFKQFFKDWK

SEQ ID NO: 725 - DNA, 1221 bp, Homo sapiens
cgcaggctggaaggaagacgaacctacgaagcagagatctgaagacagcatgtacacagccattccccagagtggctctccattcccaggctcagtgcaggatccaggcctgcatgtgtggcgggtggagaagctgaagccggtgcctgtggcgcaagagaaccagggcgtcttcttctcgggggactcctacctagtgctgcacaatggcccagaagaggtttcccatctgcacctgtggataggccagcagtcatcccgggatgagcagggggcctgtgccgtgctggctgtgcacctcaacacgctgctgggagagcggcctgtgcagcaccgcgaggtgcagggcaatgagtctgacctcttcatgagctacttcccacggggcctcaagtaccaggaaggtggtgtggagtcagcatttcacaagacctccacaggagccccagctgccatcaagaaactctaccaggtgaaggggaagaagaacatccgtgccaccgagcgggcactgaactgggacagcttcaacactggggactgcttcatcctggacctgggccagaacatcttcgcctggtgtggtggaaagtccaacatcctggaacgcaacaaggcgagggacctggccctggccatccgggacagtgagcgacagggcaaggcccaggtggagattgtcactgatggggaggagcctgctgagatgatccaggtcctgggccccaagcctgctctgaaggagggcaaccctgaggaagacctcacagctgacaaggcaaatgcccaggccgcagctctgtataaggtctctgatgccactggacagatgaacctgaccaaggtggctgactccagcccctttgcccttgaactgctgatatctgatgactgctttgtgctggacaacgggctctgtggcaagatctatatctggaaggggcgaaaagcgaatgagaaggagcggcaggcagccctgcaggtggccgagggcttcatctcgcgcatgcagtacgccccgaacactcaggtggagattctgcctcagggccgtgagagtcccatcttcaagcaatttttcaaggactggaaatgagggtgggcgtcttcctgccccatgctcccctgccccccaccacctgcctgcttgcttctctggctgcctggtcagtgcagaggtgccccctgcagatgttcaataaaggagacaagtgctttccc

SEQ ID NO: 726 - protein, 201 aa, Homo sapiens
MDPGWPCCPLPVAFLSRWLQSFVDGLFCTGGLLRQRTCKFAGAASQAPHAPAFLRARGEPQDPLSHPRVPAVSANCRMWKHLPVHSSPTPRLTPLWKLQARWLLPQLVYLQGWGSYSLLRPAALISMVLLAREFLYPAKMSVSEVCSSGLSSPLLEQHKTNLIFYASGDICSANGKSGFNQPLPFLKTFCSTHRILSCTYL

SEQ ID NO: 727 - DNA, 761 bp, Homo sapiens
atccccacccaaagcctgatggaccccggctggccatgctgtcccctccctgtggcgtttcttagcagatggctgcagagcttcgttgatggtcttttctgtactggaggcctcctgaggcagcgaacgtgcaaatttgcaggtgctgcatcccaagcccctcatgctcctgccttcctgagggccagaggggagccccaggacccattaagccacccccgtgttcctgccgtcagtgccaactgccgcatgtggaagcatctacccgttcactccagtcccaccccacgcctgactcccctctggaaactgcaggccagatggttgctgccacaacttgtgtaccttcagggatggggctcttactccctcctgaggccagctgctctaatatcgatggtcctgcttgccagagagttcctctacccagcaaaaatgagtgtctcagaagtgtgctcctctggcctcagttctcctcttttggaacaacataaaacaaatttaattttctacgcctctggggatatctgctcagccaatggaaaatctgggttcaaccagcccctgccatttcttaagactttctgctccactcacaggatcctgagctgcacttacctgtgagagtcttcaaacttttaaaccttgccagtcaggacttttgctattgcaaatagaaaacccaactcaacctgcttaagcagaaaataaatttattgattcaagtttggagaaaaaaaaaaaaaaaaaaaaaaaaaaaa

SEQ ID NO: 728 - DNA, 679 bp, Homo sapiens
  misc_feature (616)..(616): n = a, c, g, or t
  misc_feature (630)..(630): n = a, c, g, or t
  misc_feature (654)..(654): n = a, c, g, or t
ttttttttttttaaagagcactaccggggtacccaccattcccttttcctagtaatctgcaatgcaatcacaatgcccaaactagacctgccatttctcacacacagatttaggaatgaccaacttgtaccctcccagcgtttagcacaacacaatgacacccttaatttgacaatctgcttcctctaatatatccccagtctaaggcatttaaaattaaacagctcttcaacgccccaagttatttcatcaggctaagaacttctccgagaaacgcacaagaaggcaggcaaacaggtgggtaggtgagaggtcacggggctccatctgcaagctccatctacaaggcatcaatctgcgttgtggcatcaacgttaaaatgttctacagcttagggatcttcttgaagcaaggttccaagcacaaaactagtatgaccggaggctcaatttagaagatgcagcatctgaaaacctttaccccaggaaaggaggggtgcctgctggcattcatgggctctggaacaagcatttattcaaagctgatgggccctcgagccggatgcatctgctgtggactttttaagattgccccccataagctcaatctgcaactnttaatgggagcctnctgaatacagggctttctgagcanggcctgggaacagaacattggagaa

SEQ ID NO: 729 - protein, 1060 aa, Homo sapiens
MDSGAGGRRCPEAALLILGPPRMEHLRHSPGPGGQRLLLPSMLLALLLLLAPSPGHATRVVYKVPEEQPPNTLIGSLAADYGFPDVGHLYKLEVGAPYLRVDGKTGDIFTTETSIDREGLRECQNQLPGDPCILEFEVSITDLVQNGSPRLLEGQIEVQDINDNTPNFASPVITLAIPENTNIGSLFPIPLASDRDAGPNGVASYELQAGPEAQELFGLQVAEDQEEKQPQLIVMGNLDRERWDSYDLTIKVQDGGSPPRASSALLRVTVLDTNDNAPKFERPSYEAELSENSPIGHSVIQVKANDSDQGANAEIEYTFHQAPEVVRRLLRLDRNTGLITVQGPVDREDLSTLRFSVLAKDRGTNPKSARAQVVVTVKDMNDNAPTIEIRGIGLVTHQDGMANISEDVAEETAVALVQVSDRDEGENAAVTCVVAGDVPFQLRQASETGSDSKKKYFLQTTTPLDYEKVKDYTIEIVAVDSGNPPLSSTNSLKVQVVDVNDNAPVFTQSVTEVAFPENNKPGEVIAEITASDADSGSNAELVYSLEPEPAAKGLFTISPETGEIQVKTSLDREQRESYELKVVAADRGSPSLQGTATVLVNVLDCNDNDPKFMLSGYNFSVMENMPALSPVGMVTVIDGDKGENAQVQLSVEQDNGDFVIQNGTGTILSSLSFDREQQSTYTFQLKAVDGGVPPRSAYVGVTINVLDENDNAPYITAPSNTSHKLLTPQTRLGETVSQVAAEDFDSGVNAELIYSIAGGNPYGLFQIGSHSGAITLEKEIERRHHGLHRLVVKVSDRGKPPRYGTALVHLYVNETLANRTLLETLLGHSLDTPLDIDIAGDPEYERSKQRGNILFGVVAGVVAVALLIALAVLVRYCRQREAKSGYQAGKKETKDLYAPKPSGKASKGNKSKGKKSKSPKPVKPVEDEDEAGLQKSLKFNLMSDAPGDSPRIHLPLNYPPGSPDLGRHYRSNSPLPSIQLQPQSPSASKKHQVVQDLPPANTFVGTGDTTSTGSEQYSDYSYRTNPPKYPSKQVGQPFQLSTPQPLPHPYHGAIWTEVWE

SEQ ID NO: 730 - DNA, 3851 bp, Homo sapiens
cgcaaagccgccgggctgctgcgcccagagccagccggagccggagccggagcccgaactgcagctccagccccagccgtgcggagccgcagcccaggccggggccggcggcggctcatggacagcggggcgggcggccggcgctgcccggaggcggccctcctgattctggggcctcccaggatggagcacctgaggcacagcccaggccctggggggcaacggctactgctgccctccatgctgctagcactgctgctcctgctggctccatccccaggccacgccactcgggtagtgtacaaggtgccggaggaacagccacccaacaccctcattgggagcctcgcagccgactatggttttccagatgtggggcacctgtacaagctagaggtgggtgccccgtaccttcgcgtggatggcaagacaggtgacattttcaccaccgagacctccatcgaccgtgaggggctccgtgaatgccagaaccagctccctggtgatccctgcatcctggagtttgaggtatctatcacagacctcgtgcagaatggcagcccccggctgctagagggccagatagaagtacaagacatcaatgacaacacacccaacttcgcctcaccagtcatcactctggccatccctgagaacaccaacatcggctcactcttccccatcccgctggcttcagaccgtgatgctggtcccaacggtgtggcatcctatgagctgcaggctgggcctgaggcccaggagctatttgggctgcaggtggcagaggaccaggaggagaagcaaccacagctcattgtgatgggcaacctggaccgtgagcgctgggactcctatgacctcaccatcaaggtgcaggatggcggcagccccccacgcgccagcagtgccctgctgcgtgtcaccgtgcttgacaccaatgacaacgcccccaagtttgagcggccctcctatgaggccgaactatctgagaatagccccataggccactcggtcatccaggtgaaggccaatgactcagaccaaggtgccaatgcagaaatcgaatacacattccaccaggcgcccgaagttgtgaggcgtcttcttcgactggacaggaacactggacttatcactgttcagggcccggtggaccgtgaggacctaagcaccctgcgcttctcagtgcttgctaaggaccgaggcaccaaccccaagagtgcccgtgcccaggtggttgtgaccgtgaaggacatgaatgacaatgcccccaccattgagatccggggcatagggctagtgactcatcaagatgggatggctaacatctcagaggatgtggcagaggagacagctgtggccctggtgcaggtgtctgaccgagatgagggagagaatgcagctgtcacctgtgtggtggcaggtgatgtgcccttccagctgcgccaggccagtgagacaggcagtgacagcaagaagaagtatttcctgcagactaccaccccgctagactacgagaaggtcaaagactacaccattgagattgtggctgtggactctggcaaccccccactctccagcactaactccctcaaggtgcaggtggtggacgtcaatgacaacgcacctgtcttcactcagagtgtcactgaggtcgccttcccggaaaacaacaagcctggtgaagtgattgctgagatcactgccagtgatgctgactctggctctaatgctgagctggtttactctctggagcctgagccggctgctaagggcctcttcaccatctcacccgagactggagagatccaggtgaagacatctctggatcgggaacagcgggagagctatgagttgaaggtggtggcagctgaccggggcagtcctagcctccagggcacagccactgtccttgtcaatgtgctggactgcaatgacaatgaccccaaatttatgctgagtggctacaacttctcagtgatggagaacatgccagcactgagtccagtgggcatggtgactgtcattgatggagacaagggggagaatgcccaggtgcagctctcagtggagcaggacaacggtgactttgttatccagaatggcacaggcaccatcctatccagcctgagctttgatcgagagcaacaaagcacctacaccttccagctgaaggcagtggatggtggcgtcccacctcgctcagcttacgttggtgtcaccatcaatgtgctggacgagaatgacaacgcaccctatatcactgccccttctaacacctctcacaagctgctgaccccccagacacgtcttggtgagacggtcagccaggtggcagccgaggactttgactctggtgtcaatgctgagctgatctacagcattgcaggtggcaacccttatggactcttccagattgggtcacattcaggtgccatcaccctggagaaggagattgagcggcgccaccatgggctacaccgcctggtggtgaaggtcagtgaccgcggcaagcccccacgctatggcacagccttggtccatctttatgtcaatgagactctggccaaccgcacgctgctggagaccctcctgggccacagcctggacacgccgctggatattgacattgctggggatccagaatatgagcgctccaagcagcgtggcaacattctctttggtgtggtggctggtgtggtggccgtggccttgctcatcgccctggcggttcttgtgcgctactgcagacagcgggaggccaaaagtggttaccaggctggtaagaaggagaccaaggacctgtatgcccccaagcccagtggcaaggcctccaagggaaacaaaagcaaaggcaagaagagcaagtccccaaagcccgtgaagccagtggaggacgaggatgaggccgggctgcagaagtccctcaagttcaacctgatgagcgatgcccctggggacagtccccgcatccacctgcccctcaactacccaccaggcagccctgacctgggccgccactatcgctctaactccccactgccttccatccagctgcagccccagtcaccctcagcctccaagaagcaccaggtggtacaggacctgccacctgcaaacacattcgtgggcaccggggacaccacgtccacgggctctgagcagtactccgactacagctaccgcaccaacccccccaaataccccagcaagcaggtaggccagccctttcagctcagcacaccccagcccctaccccacccctaccacggagccatctggaccgaggtgtgggagtgatggagcaggtttactgtgcctgcccgtgttgggggccagcctgagccagcagtgggaggtggggccttagtgcctcaccgggcacacggattaggctgagtgaagattaagggagggtgtgctctgtggtctcctccctgccctctccccactggggagagacctgtgatttgccaagtccctggaccctggaccagctactgggccttatgggttgggggtggtaggcaggtgagcgtaagtggggagggaaatgggtaagaagtctactccaaacctaggtctctatgtcagaccagacctaggtgcttctctaggagggaaacagggagacctggggtcctgtggataactgagtggggagtctgccaggggagggcaccttcccattgtgccttctgtgtgtattgtgcattaacctcttcctcaccactaggcttctggggctgggtcccacatgcccttgaccctgacaataaagttctctatttttggaaaaaaaaaaaaaaaaaaaaaaaaaaaaaaaaaaaaaaaaaaaaaaaaaaaaaaaa

SEQ ID NO: 731 - protein, 480 aa, Homo sapiens
MSAEVIHQVEEALDTDEKEMLLFLCRDVAIDVVPPNVRDLLDILRERGKLSVGDLAELLYRVRRFDLLKRILKMDRKAVETHLLRNPHLVSDYRVLMAEIGEDLDKSDVSSLIFLMKDYMGRGKISKEKSFLDLVVELEKLNLVAPDQLDLLEKCLKNIHRIDLKTKIQKYKQSVQGAGTSYRNVLQAAIQKSLKDPSNNFRLHNGRSKEQRLKEQLGAQQEPVKKSIQESEAFLPQSIPEERYKMKSKPLGICLIIDCIGNETELLRDTFTSLGYEVQKFLHLSMHGISQILGQFACMPEHRDYDSFVCVLVSRGGSQSVYGVDQTHSGLPLHHIRRMFMGDSCPYLAGKPKMFFIQNYVVSEGQLENSSLLEVDGPAMKNVEFKAQKRGLCTVHREADFFWSLCTADMSLLEQSHSSPSLYLQCLSQKLRQERKRPLLDLHIELNGYMYDWNSRVSAKEKYYVWLQHTLRKKLILSYT

SEQ ID NO: 732 - DNA, 2243 bp, Homo sapiens
ggacgtcgaggcattacaatcgcgaaaccaagccatagcatgaaacagcgagcttgcagcctcaccgacgagtctcaactaaaagggactcccggagctaggggtggggactcggcctcacacagtgagtgccggctattggacttttgtccagtgacagctgagacaacaaggaccacgggaggaggtgtaggagagaagcgccgcgaacagcgatcgcccagcaccaagtccgcttccaggctttcggtttctttgcctccatcttgggtgcgccttcccggcgtctaggggagcgaaggctgaggtggcagcggcaggagagtccggccgcgacaggacgaactcccccactggaaaggattctgaaagaaatgaagtcagccctcagaaatgaagttgactgcctgctggctttcctgttgactggcccggagctgtactgcaagacccttgtgagcttccctagtctaagagtaggatgtctgctgaagtcatccatcaggttgaagaagcacttgatacagatgagaaggagatgctgctctttttgtgccgggatgttgctatagatgtggttccacctaatgtcagggaccttctggatattttacgggaaagaggtaagctgtctgtcggggacttggctgaactgctctacagagtgaggcgatttgacctgctcaaacgtatcttgaagatggacagaaaagctgtggagacccacctgctcaggaaccctcaccttgtttcggactatagagtgctgatggcagagattggtgaggatttggataaatctgatgtgtcctcattaattttcctcatgaaggattacatgggccgaggcaagataagcaaggagaagagtttcttggaccttgtggttgagttggagaaactaaatttggttgccccagatcaactggatttattagaaaaatgcctaaagaacatccacagaatagacctgaagacaaaaatccagaagtacaagcagtctgttcaaggagcagggacaagttacaggaatgttctccaagcagcaatccaaaagagtctcaaggatccttcaaataacttcaggctccataatgggagaagtaaagaacaaagacttaaggaacagcttggcgctcaacaagaaccagtgaagaaatccattcaggaatcagaagcttttttgcctcagagcatacctgaagagagatacaagatgaagagcaagcccctaggaatctgcctgataatcgattgcattggcaatgagacagagcttcttcgagacaccttcacttccctgggctatgaagtccagaaattcttgcatctcagtatgcatggtatatcccagattcttggccaatttgcctgtatgcccgagcaccgagactacgacagctttgtgtgtgtcctggtgagccgaggaggctcccagagtgtgtatggtgtggatcagactcactcagggctccccctgcatcacatcaggaggatgttcatgggagattcatgcccttatctagcagggaagccaaagatgttttttattcagaactatgtggtgtcagagggccagctggagaacagcagcctcttggaggtggatgggccagcgatgaagaatgtggaattcaaggctcagaagcgagggctgtgcacagttcaccgagaagctgacttcttctggagcctgtgtactgcggacatgtccctgctggagcagtctcacagctcaccgtccctgtacctgcagtgcctctcccagaaactgagacaagaaagaaaacgcccactcctggatcttcacattgaactcaatggctacatgtatgattggaacagcagagtttctgccaaggagaaatattatgtctggctgcagcacactctgagaaagaaacttatcctctcctacacataagaaaccaaaaggctgggcgtagtggctcacacctgtaatcccagcactttgggaggccaaggagggcagatcacttcaggtcaggagttcgagaccagcctggccaacatggtaaacgctgtccctagtaaaaatgcaaaaattagctgggtgtgggtgtgggtacctgtgttcccagttacttgggaggctgaggtgggaggatcttttgaacccaggagttcagggtcatagcatgctgtgattgtgcctacgaatagccactgcataccaacctgggcaatatagcaagatcccatctctttaaaaaaaaaaaaaa

SEQ ID NO: 733 - protein, 893 aa, Homo sapiens
MATEEFIIRIPPYHYIHVLDQNSNVSRVEVGPKTYIRQDNERVLFAPMRMVTVPPRHYCTVANPVSRDAQGLVLFDVTGQVRLRHADLEIRLAQDPFPLYPGEVLEKDITPLQVVLPNTALHLKALLDFEDKDGDKVVAGDEWLFEGPGTYIPRKEVEVVEIIQATIIRQNQALRLRARKECWDRDGKERVTGEEWLVTTVGAYLPAVFEEVLDLVDAVILTEKTALHLRARRNFRDFRGVSRRTGEEWLVTVQDTEAHVPDVHEEVLGVVPITTLGPHNYCVILDPVGPDGKNQLGQKRVVKGEKSFFLQPGEQLEQGIQDVYVLSEQQGLLLRALQPLEEGEDEEKVSHQAGDHWLIRGPLEYVPSAKVEVVEERQAIPLDENEGIYVQDVKTGKVRAVIGSTYMLTQDEVLWEKELPPGVEELLNKGQDPLADRGEKDTAKSLQPLAPRNKTRVVSYRVPHNAAVQVYDYREKRARVVFGPELVSLGPEEQFTVLSLSAGRPKRPHARRALCLLLGPDFFTDVITIETADHARLQLQLAYNWHFEVNDRKDPQETAKLFSVPDFVGDACKAIASRVRGAVASVTFDDFHKNSARIIRTAVFGFETSEAKGPDGMALPRPRDQAVFPQNGLVVSSVDVQSVEPVDQRTRDALQRSVQLAIEITTNSQEAAAKHEAQRLEQEARGRLERQKILDQSEAEKARKELLELEALSMAVESTGTAKAEAESRAEAARIEGEGSVLQAKLKAQALAIETEAELQRVQKVRELELVYARAQLELEVSKAQQLAEVEVKKFKQMTEAIGPSTIRDLAVAGPEMQVKLLQSLGLKSTLITDGSTPINLFNTAFGLLGMGPEGQPLGRRVASGPSPGEGISPQSAQAPQAPGDNHVVPVLR

SEQ ID NO: 734 - DNA, 2821 bp, Homo sapiens
aaaggttccccatctgaggcgtttgttgcagctacctgcacttctagattcatcttcttgtgagccctgggcttaggagtcaccatggcaactgaagagttcatcatccgcatccccccataccactatatccatgtgctggaccagaacagcaacgtgtcccgtgtggaggtcgggccaaagacctacatccggcaggacaatgagagggtactgtttgcccccatgcgcatggtgaccgtccccccacgtcactactgcacagtggccaaccctgtgtctcgggatgcccagggcttggtgctgtttgatgtcacagggcaagttcggcttcgccacgctgacctcgagatccggctggcccaggaccccttccccctgtacccaggggaggtgctggaaaaggacatcacacccctgcaggtggttctgcccaacactgccctccatctaaaggcgctgcttgattttgaggataaagatggagacaaggtggtggcaggagatgagtggcttttcgagggacctggcacgtacatcccccggaaggaagtggaggtcgtggagatcattcaggccaccatcatcaggcagaaccaggctctgcggctcagggcccgcaaggagtgctgggaccgggacggcaaggagagggtgacaggggaagaatggctggtcaccacagtaggggcgtacctcccagcggtgtttgaggaggttctggatttggtggacgccgtcatccttacggaaaagacagccctgcacctccgggctcggcggaacttccgggacttcaggggagtgtcccgccgcactggggaggagtggctggtaacagtgcaggacacagaggcccacgtgccagatgtccacgaggaggtgctgggggttgtgcccatcaccaccctgggcccccacaactactgcgtgattctcgaccctgtcggaccggatggcaagaatcagctggggcagaagcgcgtggtcaagggagagaagtcttttttcctccagccaggagagcagctggaacaaggcatccaggatgtgtatgtgctgtcggagcagcaggggctgctgctgagggccctgcagcccctggaggagggggaggatgaggagaaggtctcacaccaggctggggaccactggctcatccgcggacccctggagtatgtgccatctgccaaagtggaggtggtggaggagcgccaggccatccctctagacgagaacgagggcatctatgtgcaggatgtcaagaccggaaaggtgcgcgctgtgattggaagcacctacatgctgacccaggacgaagtcctgtgggagaaagagctgcctcccggggtggaggagctgctgaacaaggggcaggaccctctggcagacaggggtgagaaggacacagctaagagcctccagcccttggcgccccggaacaagacccgtgtggtcagctaccgcgtgccccacaacgctgcggtgcaggtgtacgactaccgagagaagcgagcccgcgtggtcttcgggcctgagctggtgtcgctgggtcctgaggagcagttcacagtgttgtccctctcagctgggcggcccaagcgtccccatgcccgccgtgcgctctgcctgctgctggggcctgacttcttcacagacgtcatcaccatcgaaacggcggatcatgccaggctgcaactgcagctggcctacaactggcactttgaggtgaatgaccggaaggacccccaagagacggccaagctcttttcagtgccagactttgtaggtgatgcctgcaaagccatcgcatcccgggtgcggggggccgtggcctctgtcactttcgatgacttccataagaactcagcccgcatcattcgcactgctgtctttggctttgagacctcggaagcgaagggccccgatggcatggccctgcccaggccccgggaccaggctgtcttcccccaaaacgggctggtggtcagcagtgtggacgtgcagtcagtggagcctgtggatcagaggacccgggacgccctgcaacgcagcgtccagctggccatcgagatcaccaccaactcccaggaagcggcggccaagcatgaggctcagagactggagcaggaagcccgcggccggcttgagcggcagaagatcctggaccagtcagaagccgagaaagctcgcaaggaacttttggagctggaggctctgagcatggccgtggagagcaccgggactgccaaggcggaggccgagtcccgtgcggaggcagcccggattgagggagaagggtccgtgctgcaggccaagctaaaagcacaggccttggccattgaaacggaggctgagctccagagggtccagaaggtccgagagctggaactggtctatgcccgggcccagctggagctggaggtgagcaaggctcagcagctggctgaggtggaggtgaagaagttcaagcagatgacagaggccataggccccagcaccatcagggaccttgctgtggctgggcctgagatgcaggtaaaactgctccagtccctgggcctgaaatcaaccctcatcaccgatggctccactcccatcaacctcttcaacacagcctttgggctgctggggatggggcccgagggtcagcccctgggcagaagggtggccagtgggcccagccctggggaggggatatccccccagtctgctcaggcccctcaagctcctggagacaaccacgtggtgcctgtactgcgctaactcctgattaatacaatggaagtttctgggcaaaaaaaaaaaaaaaaagtttcca

SEQ ID NO: 735 - protein, 622 aa, Homo sapiens
MSRQTTSVGSSCLDLWREKNDRLVRQAKVAQNSGLTLRRQQLAQDALEGLRGLLHSLQGLPAAVPVLPLELTVTCNFIILRASLAQGFTEDQAQDIQRSLERVLETQEQQGPRLEQGLRELWDSVLRASCLLPELLSALHRLVGLQAALWLSADRLGDLALLLETLNGSQSGASKDLLLLLKTWSPPAEELDAPLTLQDAQGLKDVLLTAFAYRQGLQELITGNPDKALSSLHEAASGLCPRPVLVQVYTALGSCHRKMGNPQRALLYLVAALKEGSAWGPPLLEASRLYQQLGDTTAELESLELLVEALNVPCSSKAPQFLIEVELLLPPPDLASPLHCGTQSQTKHILASRCLQTGRAGDAAEHYLDLLALLLDSSEPRFSPPPSPPGPCMPEVFLEAAVALIQAGRAQDALTLCEELLSRTSSLLPKMSRLWEDARKGTKELPYCPLWVSATHLLQGQAWVQLGAQKVAISEFSRCLELLFRATPEEKEQGAAFNCEQGCKSDAALQQLRAAALISRGLEWVASGQDTKALQDFLLSVQMCPGNRDTYFHLLQTLKRLDRRDEATALWWRLEAQTKGSHEDALWSLPLYLESYLSWIRPSDRDAFLEEFRTSLPKSCDL

SEQ ID NO: 736 - DNA, 2649 bp, Homo sapiens
aggaggacctgggggtgtggcagcgaggaagggccgagccacggactgtggggccgaaactcgctcccgcccaccctttctcgaggctgtggcctccgcgagagccgagcgggccgcaccgccggccgtgcgactgccccagtcagacacgaccccggcttctagcccgcctaagcctgtttggggttgctgactcgtttcctccccgagtttcccgcgggaactaactcttcaagaggaccaaccgcagcccagagcttcgcagacccggccaaccagaggcgaggttgagagcccggcgggccgcggggagagagcgtcccatctgtcctggaaagcctgggcgggtggattgggaccccgagagaagcaggggagctcggcggggtgcagaagtgcccaggcccctccccgctggggttgggagcttgggcaggccagcttcacccttcctaagtccgcttctggtctccgggcccagcctcggccaccatgtcccgccagaccacctctgtgggctccagctgcctggacctgtggagggaaaagaatgaccggctcgttcgacaggccaaggtggctcagaactccggtctgactctgaggcgacagcagttggctcaggatgcactggaagggctcagagggctcctccatagtctgcaagggctccctgcagctgttcctgttcttcccttggagctgactgtcacctgcaacttcattatcctgagggcaagcttggcccagggtttcacagaggatcaggcccaggatatccagcggagcctagagagagtgctggagacacaggagcagcaggggcccaggttggaacaggggctcagggagctgtgggactctgtccttcgtgcttcctgccttctgccggagctgctgtctgccctgcaccgcctggttggcctgcaggctgccctctggttgagtgctgaccgtcttggggacctggccttgttactagagaccctgaatggcagccagagtggagcctctaaggatctgctgttacttctgaaaacttggagtcccccagctgaggaattagatgctccattgaccctgcaggatgcccagggattgaaggatgtcctcctgacagcatttgcctaccgccaaggtctccaggagctgatcacagggaacccagacaaggcactaagcagccttcatgaagcggcctcaggcctgtgtccacggcctgtgttggtccaggtgtacacagcactggggtcctgtcaccgtaagatgggaaatccacagagagcactgttgtacttggttgcagccctgaaagagggatcagcctggggtcctccacttctggaggcctctaggctctatcagcaactgggggacacaacagcagagctggagagtctggagctgctagttgaggccttgaatgtcccatgcagttccaaagccccgcagtttctcattgaggtagaattactactgccaccacctgacctagcctcaccccttcattgtggcactcagagccagaccaagcacatactagcaagcaggtgcctacagacggggagggcaggagacgctgcagagcattacttggacctgctggccctgttgctggatagctcggagccaaggttctccccacccccctcccctccagggccctgtatgcctgaggtgtttttggaggcagcggtagcactgatccaggcaggcagagcccaagatgccttgactctatgtgaggagttgctcagccgcacatcatctctgctacccaagatgtcccggctgtgggaagatgccagaaaaggaaccaaggaactgccatactgcccactctgggtctctgccacccacctgcttcagggccaggcctgggttcaactgggtgcccaaaaagtggcaattagtgaatttagcaggtgcctcgagctgctcttccgggccacacctgaggaaaaagaacaaggggcagctttcaactgtgagcagggatgtaagtcagatgcggcactgcagcagcttcgggcagccgccctaattagtcgtggactggaatgggtagccagcggccaggataccaaagccttacaggacttcctcctcagtgtgcagatgtgcccaggtaatcgagacacttactttcacctgcttcagactctgaagaggctagatcggagggatgaggccactgcactctggtggaggctggaggcccaaactaaggggtcacatgaagatgctctgtggtctctccccctgtacctagaaagctatttgagctggatccgtccctctgatcgtgacgccttccttgaagaatttcggacatctctgccaaagtcttgtgacctgtagctgccacgttttgaagagcttgagctgggtccccagtgggctgtctctctgtggggagggctttctgcttcaccatcattaggaatgtgaccattcctatataattcctggactggtgagattggtggtaggcctgtgaaatttgccctagttactaccattctcgttttggaggaaacaatctctgccaccaccaagtcattgactttgctcgaggcaccttttttcctgtttctccttttctgttgtcgagtaaaatttcatatttataaaaaaaaaaaaaaaaaa

SEQ ID NO: 737 - protein, 253 aa, Homo sapiens
MANLGCWMLVLFVATWSDLGLCKKRPKPGGWNTGGSRYPGQGSPGGNRYPPQGGGGWGQPHGGGWGQPHGGGWGQPHGGGWGQPHGGGWGQGGGTHSQWNKPSKPKTNMKHMAGAAAAGAVVGGLGGYMLGSAMSRPIIHFGSDYEDRYYRENMHRYPNQVYYRPMDEYSNQNNFVHDCVNITIKQHTVTTTTKGENFTETDVKMMERVVEQMCITQYERESQAYYQRGSSMVLFSSPPVILLISFLIFLIVG

SEQ ID NO: 738 - DNA, 2415 bp, Homo sapiens
cggcgccgcgagcttctcctctcctcacgaccgaggcagagcagtcattatggcgaaccttggctgctggatgctggttctctttgtggccacatggagtgacctgggcctctgcaagaagcgcccgaagcctggaggatggaacactgggggcagccgatacccggggcagggcagccctggaggcaaccgctacccacctcagggcggtggtggctgggggcagcctcatggtggtggctgggggcagcctcatggtggtggctgggggcagccccatggtggtggctggggacagcctcatggtggtggctggggtcaaggaggtggcacccacagtcagtggaacaagccgagtaagccaaaaaccaacatgaagcacatggctggtgctgcagcagctggggcagtggtggggggccttggcggctacatgctgggaagtgccatgagcaggcccatcatacatttcggcagtgactatgaggaccgttactatcgtgaaaacatgcaccgttaccccaaccaagtgtactacaggcccatggatgagtacagcaaccagaacaactttgtgcacgactgcgtcaatatcacaatcaagcagcacacggtcaccacaaccaccaagggggagaacttcaccgagaccgacgttaagatgatggagcgcgtggttgagcagatgtgtatcacccagtacgagagggaatctcaggcctattaccagagaggatcgagcatggtcctcttctcctctccacctgtgatcctcctgatctctttcctcatcttcctgatagtgggatgaggaaggtcttcctgttttcaccatctttctaatctttttccagcttgagggaggcggtatccacctgcagcccttttagtggtggtgtctcactctttcttctctctttgtcccggataggctaatcaatacccttggcactgatgggcactggaaaacatagagtagacctgagatgctggtcaagccccctttgattgagttcatcatgagccgttgctaatgccaggccagtaaaagtataacagcaaataaccattggttaatctggacttatttttggacttagtgcaacaggttgaggctaaaacaaatctcagaacagtctgaaatacctttgcctggatacctctggctccttcagcagctagagctcagtatactaatgccctatcttagtagagatttcatagctatttagagatattttccattttaagaaaacccgacaacatttctgccaggtttgttaggaggccacatgatacttattcaaaaaaatcctagagattcttagctcttgggatgcaggctcagcccgctggagcatgagctctgtgtgtaccgagaactggggtgatgttttacttttcacagtatgggctacacagcagctgttcaacaagagtaaatattgtcacaacactgaacctctggctagaggacatattcacagtgaacataactgtaacatatatgaaaggcttctgggacttgaaatcaaatgtttgggaatggtgcccttggaggcaacctcccattttagatgtttaaaggaccctatatgtggcattcctttctttaaactataggtaattaaggcagctgaaaagtaaattgccttctagacactgaaggcaaatctcctttgtccatttacctggaaaccagaatgattttgacatacaggagagctgcagttgtgaaagcaccatcatcatagaggatgatgtaattaaaaaatggtcagtgtgcaaagaaaagaactgcttgcatttctttatttctgtctcataattgtcaaaaaccagaattaggtcaagttcatagtttctgtaattggcttttgaatcaaagaatagggagacaatctaaaaaatatcttaggttggagatgacagaaatatgattgatttgaagtggaaaaagaaattctgttaatgttaattaaagtaaaattattccctgaattgtttgatattgtcacctagcagatatgtattacttttctgcaatgttattattggcttgcactttgtgagtatctatgtaaaaatatatatgtatataaaatatatattgcataggacagacttaggagttttgtttagagcagttaacatctgaagtgtctaatgcattaacttttgtaaggtactgaatacttaatatgtgggaaacccttttgcgtggtccttaggcttacaatgtgcactgaatcgtttcatgtaagaatccaaagtggacaccattaacaggtctttgaaatatgcatgtactttatattttctatatttgtaactttgcatgttcttgttttgttatataaaaaaattgtaaatgtttaatatctgactgaaattaaacgagcgaagatgagcacc

SEQ ID NO: 739 - protein, 165 aa, Homo sapiens
MGWDLTVKMLAGNEFQVSLSSSMSVSELKAQITQKIGVHAFQQRLAVHPSGVALQDRVPLASQGLGPGSTVLLVVDKCDEPLSILVRNNKGRSSTYEVRLTQTVAHLKQQVSGLEGVQDDLFWLTFEGKPLEDQLPLGEYGLKPLSTVFMNLRLRGGGTEPGGRS

SEQ ID NO: 740 - DNA, 634 bp, Homo sapiens
cggctgagaggcagcgaactcatctttgccagtacaggagcttgtgccgtggcccacagcccacagcccacagccatgggctgggacctgacggtgaagatgctggcgggcaacgaattccaggtgtccctgagcagctccatgtcggtgtcagagctgaaggcgcagatcacccagaagattggcgtgcacgccttccagcagcgtctggctgtccacccgagcggtgtggcgctgcaggacagggtcccccttgccagccagggcctgggccctggcagcacggtcctgctggtggtggacaaatgcgacgaacctctgagcatcctggtgaggaataacaagggccgcagcagcacctacgaggtccggctgacgcagaccgtggcccacctgaagcagcaagtgagcgggctggagggtgtgcaggacgacctgttctggctgaccttcgaggggaagcccctggaggaccagctcccgctgggggagtacggcctcaagcccctgagcaccgtgttcatgaatctgcgcctgcggggaggcggcacagagcctggcgggcggagctaagggcctccaccagcatccgagcaggatcaagggccggaaataaaggctgttgtaagagaat

SEQ ID NO: 741 - protein, 374 aa, Homo sapiens
MDDLCEANGTFAISLFKILGEEDNSRNVFFSPMSISSALAMVFMGAKGSTAAQMSQALCLYKDGDIHRGFQSLLSEVNRTGTQYLLRTANRLFGEKTCDFLPDFKEYCQKFYQAELEELSFAEDTEECRKHINDWVAEKTEGKISEVLDAGTVDPLTKLVLVNAIYFKGKWNEQFDRKYTRGMLFKTNEEKKTVQMMFKEAKFKMGYADEVHTQVLELPYVEEELSMVILLPDDNTDLAVVEKALTYEKFKAWTNSEKLTKSKVQVFLPRLKLEESYDLEPFLRRLGMIDAFDEAKADFSGMSTEKNVPLSKVAHKCFVEVNEEGTEAAAATAVVRNSRCSRMEPRFCADHPFLFFIRRHKTNCILFCGRFSSP

SEQ ID NO: 742 - DNA, 1325 bp, Homo sapiens
agcatctacaaaggaggaatagtcaaagcagcagcggcggcggcggcggcggcagcagcagcagcagcaggagaccttctctgatggatgacctctgtgaagcaaatggcacttttgccatcagcttatttaaaatattgggggaagaggacaactcaagaaacgtattcttctctcccatgagcatctcctctgccctggccatggtcttcatgggggcaaagggaagcactgcagcccagatgtcccaggcactttgtttatacaaagacggagatattcaccgaggtttccagtcacttctcagtgaagttaacagaactggcactcagtacttgcttagaactgccaacagactctttggagaaaagacgtgtgatttccttccagactttaaagaatactgtcagaagttctatcaggcagagctggaggagttgtcctttgctgaagacactgaagagtgcaggaagcatataaatgactgggtggcagagaagactgaaggtaagatttcagaggtactggatgctgggacagtcgatcccctgacaaagctagtccttgtgaatgccatttatttcaagggaaagtggaatgagcaatttgacagaaagtacacaaggggaatgctctttaaaaccaacgaggaaaaaaagacagtgcagatgatgtttaaggaagctaagtttaaaatggggtatgcggatgaggtacacacccaggtcctggagctgccctatgtggaagaggagctgagcatggtcattctgcttcccgatgacaacacggacctcgccgtggtggaaaaagcacttacatatgagaaattcaaagcctggacaaattcagaaaagttgacaaaaagtaaggttcaagttttccttcccagattaaagctggaggagagttatgacttggagcctttccttcgaagattaggaatgatcgatgcttttgacgaagccaaggcagacttttctggaatgtcaactgagaagaatgtgcctctgtccaaggttgcccacaagtgcttcgtggaggtcaatgaggaaggcacagaggctgccgcagccactgctgtggtcaggaattcccggtgcagcagaatggagccaagattctgtgcagaccacccttttcttttcttcatcaggcgccacaaaaccaactgcatcttgttctgtggcaggttctcttctccgtaaagaggagcaattgctgtacataccctcctttccttctacctatcttgccttaattaacattccctgtgacctagttggtgcagtggcttgaatgccaaaataaagcgtgtgcactgg

SEQ ID NO: 743 - protein, 368 aa, Homo sapiens
MWPLWRLVSLLALSQALPFEQRGFWDFTLDDGPFMMNDEEASGADTSGVLDPDSVTPTYSAMCPFGCHCHLRVVQCSDLGLKSVPKEISPDTTLLDLQNNDISELRKDDFKGLQHLYALVLVNNKISKIHEKAFSPLRKLQKLYISKNHLVEIPPNLPSSLVELRIHDNRIRKVPKGVFSGLRNMNCIEMGGNPLENSGFEPGAFDGLKLNYLRISEAKLTGIPKDLPETLNELHLDHNKIQAIELEDLLRYSKLYRLGLGHNQIRMIENGSLSFLPTLRELHLDNNKLARVPSGLPDLKLLQVVYLHSNNITKVGVNDFCPMGFGVKRAYYNGISLFNNPVPYWEVQPATFRCVTDRLAIQFGNYKK

SEQ ID NO: 744 - DNA, 2367 bp, Homo sapiens
tctctccacaaactgcccaggagtgagtagctgctttcggtccgccggacacaccggacagatagacgtgcggacggcccaccaccccagcccgccaactagtcagcctgcgcctggcgcctcccctctccaggtccatccgccatgtggcccctgtggcgcctcgtgtctctgctggccctgagccaggccctgccctttgagcagagaggcttctgggacttcaccctggacgatgggccattcatgatgaacgatgaggaagcttcgggcgctgacacctcaggcgtcctggacccggactctgtcacacccacctacagcgccatgtgtcctttcggctgccactgccacctgcgggtggttcagtgctccgacctgggtctgaagtctgtgcccaaagagatctcccctgacaccacgctgctggacctgcagaacaacgacatctccgagctccgcaaggatgacttcaagggtctccagcacctctacgccctcgtcctggtgaacaacaagatctccaagatccatgagaaggccttcagcccactgcggaagctgcagaagctctacatctccaagaaccacctggtggagatcccgcccaacctacccagctccctggtggagctccgcatccacgacaaccgcatccgcaaggtgcccaagggagtgttcagcgggctccggaacatgaactgcatcgagatgggcgggaacccactggagaacagtggctttgaacctggagccttcgatggcctgaagctcaactacctgcgcatctcagaggccaagctgactggcatccccaaagacctccctgagaccctgaatgaactccacctagaccacaacaaaatccaggccatcgaactggaggacctgcttcgctactccaagctgtacaggctgggcctaggccacaaccagatcaggatgatcgagaacgggagcctgagcttcctgcccaccctccgggagctccacttggacaacaacaagttggccagggtgccctcagggctcccagacctcaagctcctccaggtggtctatctgcactccaacaacatcaccaaagtgggtgtcaacgacttctgtcccatgggcttcggggtgaagcgggcctactacaacggcatcagcctcttcaacaaccccgtgccctactgggaggtgcagccggccactttccgctgcgtcactgaccgcctggccatccagtttggcaactacaaaaagtagaggcagctgcagccaccgcggggcctcagtgggggtctctggggaacacagccagacatcctgatggggaggcagagccaggaagctaagccagggcccagctgcgtccaacccagccccccacctcgggtccctgaccccagctcgatgccccatcaccgcctctccctggctcccaagggtgcaggtgggcgcaaggcccggcccccatcacatgttcccttggcctcagagctgcccctgctctcccaccacagccacccagaggcaccccatgaagcttttttctcgttcactcccaaacccaagtgtccaaggctccagtcctaggagaacagtccctgggtcagcagccaggaggcggtccataagaatggggacagtgggctctgccagggctgccgcacctgtccagacacacatgttctgttcctcctcctcatgcatttccagcctttcaaccctccccgactctgcggctcccctcagcccccttgcaagttcatggcctgtccctcccagacccctgctccactggcccttcgaccagtcctcccttctgttctctctttccccgtccttcctctctctctctctctctctctgtgtgtgtgtgtgtgtgtgtgtgtgtgtgtgtgtgtgtgtgtgtgtgtgtcttgtgcttcctcagacctttctcgcttctgagcttggtggcctgttccctccatctctccgaacctggcttcgcctgtccctttcactccacaccctctggccttctgccttgagctgggactgctttctgtctgtccggcctgcacccagcccctgcccacaaaaccccagggacagcggtctccccagcctgccctgctcaggccttgcccccaaacctgtactgtcccggaggaggttgggaggtggaggcccagcatcccgcgcagatgacaccatcaaccgccagagtcccagacaccggttttcctagaagcccctcacccccactggcccactggtggctaggtctccccttatccttctggtccagcgcaaggaggggctgcttctgaggtcggtggctgtctttccattaaagaaacaccgtgcaacgtgaaaaaaaaaaaaaaaaaaaaa

SEQ ID NO: 745 - protein, 352 aa, Homo sapiens
MEGISIYTSDNYTEEMGSGDYDSMKEPCFREENANFNKIFLPTIYSIIFLTGIVGNGLVILVMGYQKKLRSMTDKYRLHLSVADLLFVITLPFWAVDAVANWYFGNFLCKAVHVIYTVNLYSSVLILAFISLDRYLAIVHATNSQRPRKLLAEKVVYVGVWIPALLLTIPDFIFANVSEADDRYICDRFYPNDLWVVVFQFQHIMVGLILPGIVILSCYCIIISKLSHSKGHQKRKALKTTVILILAFFACWLPYYIGISIDSFILLEIIKQGCEFENTVHKWISITEALAFFHCCLNPILYAFLGAKFKTSAQHALTSVSRGSSLKILSKGKRGGHSSVSTESESSSFHSS

SEQ ID NO: 746 - DNA, 1679 bp, Homo sapiens
gtttgttggctgcggcagcaggtagcaaagtgacgccgagggcctgagtgctccagtagccaccgcatctggagaaccagcggttaccatggaggggatcagtatatacacttcagataactacaccgaggaaatgggctcaggggactatgactccatgaaggaaccctgtttccgtgaagaaaatgctaatttcaataaaatcttcctgcccaccatctactccatcatcttcttaactggcattgtgggcaatggattggtcatcctggtcatgggttaccagaagaaactgagaagcatgacggacaagtacaggctgcacctgtcagtggccgacctcctctttgtcatcacgcttcccttctgggcagttgatgccgtggcaaactggtactttgggaacttcctatgcaaggcagtccatgtcatctacacagtcaacctctacagcagtgtcctcatcctggccttcatcagtctggaccgctacctggccatcgtccacgccaccaacagtcagaggccaaggaagctgttggctgaaaaggtggtctatgttggcgtctggatccctgccctcctgctgactattcccgacttcatctttgccaacgtcagtgaggcagatgacagatatatctgtgaccgcttctaccccaatgacttgtgggtggttgtgttccagtttcagcacatcatggttggccttatcctgcctggtattgtcatcctgtcctgctattgcattatcatctccaagctgtcacactccaagggccaccagaagcgcaaggccctcaagaccacagtcatcctcatcctggctttcttcgcctgttggctgccttactacattgggatcagcatcgactccttcatcctcctggaaatcatcaagcaagggtgtgagtttgagaacactgtgcacaagtggatttccatcaccgaggccctagctttcttccactgttgtctgaaccccatcctctatgctttccttggagccaaatttaaaacctctgcccagcacgcactcacctctgtgagcagagggtccagcctcaagatcctctccaaaggaaagcgaggtggacattcatctgtttccactgagtctgagtcttcaagttttcactccagctaacacagatgtaaaagacttttttttatacgataaataacttttttttaagttacacatttttcagatataaaagactgaccaatattgtacagtttttattgcttgttggatttttgtcttgtgtttctttagtttttgtgaagtttaattgacttatttatataaattttttttgtttcatattgatgtgtgtctaggcaggacctgtggccaagttcttagttgctgtatgtctcgtggtaggactgtagaaaagggaactgaacattccagagcgtgtagtgaatcacgtaaagctagaaatgatccccagctgtttatgcatagataatctctccattcccgtggaacgtttttcctgttcttaagacgtgattttgctgtagaagatggcacttataaccaaagcccaaagtggtatagaaatgctggtttttcagttttcaggagtgggttgatttcagcacctacagtgtacagtcttgtattaagttgttaataaaagtacatgttaaacttacttagtgttatg

SEQ ID NO: 747 - protein, 223 aa, Homo sapiens [sequence omitted]

SEQ ID NO: 748 - DNA, 1119 bp, Homo sapiens
ggcacgaggcctgggcggctccgctagctgtttttcgtcttccctaggctatttctgccgggcgctccgcgaagatgcagctcaagccgatggagatcaaccccgagatgctgaacaaagtgctgtcccggctgggggtcgccggccagtggcgcttcgtggacgtgctggggctggaagaggagtctctgggctcggtgccagcgcctgcctgcgcgctgctgctgctgtttcccctcacggcccagcatgagaacttcaggaaaaagcagattgaagagctgaagggacaagaagttagtcctaaagtgtacttcatgaagcagaccattgggaattcctgtggcacaatcggacttattcacgcagtggccaataatcaagacaaactgggatttgaggatggatcagttctgaaacagtttctttctgaaacagagaaaatgtcccctgaagacagagcaaaatgctttgaaaagaatgaggccatacaggcagcccatgatgccgtggcacaggaaggccaatgtcgggtagatgacaaggtgaatttccattttattctgtttaacaacgtggatggccacctctatgaacttgatggacgaatgccttttccggtgaaccatggcgccagttcagaggacaccctgctgaaggacgctgccaaggtctgcagagaattcaccgagcgtgagcaaggagaagtccgcttctctgccgtggctctctgcaaggcagcctaatgctctgtgggagggactttgctgatttcccctcttcccttcaacatgaaaatatatacccccccatgcagtctaaaatgcttcagtacttgtgaaacacagctgttcttctgttctgcagacacgccttcccctcagccacacccaggcacttaagcacaagcagagtgcacagctgtccactgggccattgtggtgtgagcttcagatggtgaagcattctccccagtgtatgtcttgtatccgatatctaacgctttaaatggctactttggtttctgtctgtaagttaagaccttggatgtggtttaattgtttgtcctcaaaaggaataaaacttttctgctgataagataaaaaaaaaaaaaaaaaa

SEQ ID NO: 749 - protein, 539 aa, Homo sapiens
MERPAPLAVLPFSDPAHALSLLRGLSQLRAERKFLDVTLEAAGGRDFPAHRAVLAAASPYFRAMFAGQLRESRAERVRLHGVPPDMLQLLLDFSYTGRVAVSGDNAEPLLRAADLLQFPAVKEACGAFLQQQLDLANCLDMQDFAEAFSCSGLASAAQRFILRHVGELGAEQLERLPLARLLRYLRDDGLCVPKEEAAYQLALRWVRADPPRRAAHWPQLLEAVRLPFVRRFYLLAHVEAEPLVARCPPCLRLLREARDFQAARYDRHDRGPCPRMRPRPSTGLAEILVLVGGCDQDCDELVTVDCYNPQTGQWRYLAEFPDHLGGGYSIVALGNDIYVTGGSDGSRLYDCVWRYNSSVNEWAEVAPMLKAREYHSSSVLDGLLYVVAADSTERYDHTTDSWEALQPMTYPMDNCSTTACRGRLYAIGSLAGKETMVMQCYDPDTDLWSLVDCGQLPPWSFAPKTATLNGLMYFVRDDSAEVDVYNPTRNEWDKIPSMNQVNFQAGQHWKHRLVLILQPKCHRDECLGSTAMMDGSHLN

SEQ ID NO: 750 - DNA, 6450 bp, Homo sapiens
cgcgctcgcggggggcggtggcgcccggcacagaggggttaagggggcggtgcagacgtctccccgcccatcccgcccctcgagagccgcggcgccccgccctatttatagcagcggtgcctagcgcgccgcgtctctccgcaggccccggccgcggcgtcctcgacaacctatcgaaggcgccatggagcgaccggcgcccctggccgtgcttcccttctcggaccccgcgcacgccctgagcctgctgcgcggcctgagccagctgcgcgccgagcgcaagttcctggacgtgaccctggaggcggcgggcgggcgcgacttcccggcgcaccgtgcggtgctggccgccgccagcccctacttccgcgccatgttcgcggggcagctgcgcgagagccgcgccgagcgggtgcgcctgcacggagtgcctcccgacatgctgcagctgctgctggacttcagctacacgggccgcgtggcggtaagcggcgacaacgctgagccgctgctgcgcgccgccgacctgctgcagttcccggccgtgaaggaggcgtgcggggccttcctgcagcagcagctcgacctggccaactgcctggacatgcaggacttcgctgaggccttcagctgctcgggactggcgagcgcggcgcagcggttcattctgcgccacgtgggcgagctgggcgccgagcagctggagcggctgccactggcgcgcctgctgcgctacctgcgggacgacgggctgtgtgtgcccaaggaggaggccgcctaccagctggcgctgcgctgggtccgcgctgacccgccgcgccgcgccgcgcactggccgcagctgctggaggccgtgcgcctgcccttcgtgcgccgcttctacctgttggcgcacgtcgaggccgagccgctggtggcgcgctgcccaccctgcctgcgcctgctgcgcgaggcgcgcgacttccaggcggcgcgctacgaccgccacgaccgcgggccctgtccccgaatgcgtcctcgcccgtccaccggtctcgccgagatcctcgtgctcgtgggcggctgcgaccaggactgtgacgagctggtcactgtcgactgctacaacccgcagacgggtcagtggcgctacctggccgagttcccagaccacctgggcggaggctacagcatcgtggcgctgggcaatgacatctacgtgacgggtgggtccgatggctcccggctctatgactgcgtgtggaggtacaactcaagcgtgaatgagtgggcggaggtggcgcccatgctgaaggcccgcgagtaccacagctcctctgtgctggacggactgctgtacgtggtggccgccgacagcaccgagcgctatgaccacaccactgactcctgggaggccctgcagcccatgacctaccccatggacaactgctccaccactgcgtgccgtggccggctctatgccatcggctccctggctggcaaggagaccatggtgatgcagtgctacgacccggacaccgacctgtggtcgctggtggactgcggccagctcccgccctggtccttcgcccccaagactgcgactctaaacggactcatgtactttgtcagggatgactccgctgaggtggacgtgtacaacccgacgaggaacgaatgggacaagatcccgtccatgaatcaggtaaattttcaggcgggccagcattggaagcacaggctggtcctgattttgcaacccaagtgtcatcgtgatgagtgtttgggatccacagccatgatggatgggtctcatctcaattaatagaaggctgctcttacccttattttgcacttaaggctcactgagacacagatgttaagtaataccctatgattacacagcttagtacacatttgagcagtgtttattgagtatctgctgtgagccagagagcagaaggaagtgagggagcaaggcatacagtcatctggggacacctgttccagagagggacagcaggtacagaggccctgcagcagggcaccctggcgtgttcttagatacaccagcagcccatgtggccggagcagagtcagcatgaggtctgtgacctaccttttttatttttgagacagggtcttgctctgtcacccaggctggagtgcagtggtacaatcatggctcactgcagcctccacctccttgactcgcagtcctcccaccgcaccttcctgaatagctgagactacaggcgtgtgccaccacacccagtaattttttttctcatatgtagatacaaaaggatattcttaaaatttttatagagacagggtcttgctgtgttacccaggctggtctcacactcctggcctcaagtgaccctcctgtctcagcctcccaaagtgctaggattataggcgtgaaccaccacgcccagctggttcctgaggaagtcagtgtgggaatactttttttttttttatacggagtctcgctctgtcacccaggctggagtgcagtggcacgatctcggctcactgcaagctccatctcccaggttcacgccattctcccgcctcaacctcccgagtagctgggactacaggtacccaccaccacgcccagctaattttgtttgtgtatttttagtagagacgggatttcactgtgttagccaggatggtctggatctcctgaccttgtgatctgcctggctcagcctcccaaagtgctgggattacaggcatgagccaccatgcccagcccactgtgggaatacttgtgttgagcacttgctgtgtgttctgaataggacaaccagggtccaccccttctctctgggcttgttgagaagaggggtgcccagcctgacagtgatgggacagggaggcttcagtgccatttggccatgtgagcagtgttagtctgaggtacacatcatattgcctacagccttctttcctgtgtgtctgttaacatttccaaacctacactccgtgacatccagcctcacagcttacatcacagcttaatgtcctggcatttaagagacccagcgttctgttttccccgcagtaagctgcacatagtcatagcgaatttgggaaagatggaaggaatcatccagcctcgcggttcagagcccagctctgccactgtcagccatgcaagcctcagttttcccatctgtaacatggggagaacagcactgctcagcccagagggccactgcagagattctgagagagaacgtaggaagcgctgctcggcacgacctgcacacggggaggcctggcgctgcagcgggcaccctcatcaccatagggaaggcccagctgcctccggggaggcccgttctcctaggcagggtgttggaaaggggttggcctctctgctgctttctgggagagccaaggccacccctctggggtactgacagggcatgccttgtctccagtggttccccaggtggggccctgccctaccctctcctctgacctccactcactcatccctttggcccacaggtacatgtggggggcagcctggccgtccttggggggaagctgtacgtctctgggggatacgacaatacatttgaactctcggacgtggtagaggcctatgacccagagactcgcgcgtggagcgtggtggggcggctcccagaacccaccttctggcatggcagtgtcagcatcttccgccagttcatgccccagaccttctcgggtgggcgtggcttcgagttggacagtggcagcgatgacatggacccaggccgaccccggccgccgcgggaccccgatgagctgcactagccccagtctggcccggcacgggcctcggtgcaggtaactggcacctctgcggggcagtgccccactcctttgtgcacaaggacacgttgggctcacaggaggagcacaggctcttgggtggcgaagccagcccaggatccattacctggaaggtttctgtaccttgagagcctgaatcagaggccgtcgggaacgccctccctgcagttgaggaagagccactttcctgccagcacatgtttctgggtcttggaggtcacccccaccccgcggatcacagctcacccacgcggcgcacacccctcctgccgttgtcatctgcacctacttgttcccaccttgggagaggacgatgacttgggagggacgcgtgaagggagaaggggtcctcccatgaggctgaggatggcctgaacctggagcagcggaccaggcagacgggctgaagtggggtcccaaattccatgtccagaggtgtggggagcctgcctccctagctcctggcccctgccaggggcttacatcaaaacacctcagagggctgccctccagaggctgcacccagaacagtgggacatgagcaggggtgtgggcttggagggtgaagaggatgtggtcctatcagatgctgggcctcctcagccatagccccctgctcctaccccctgactggctcttgcgtcctcacctctcaccctctccttcccgggaggccctgggaggtgatcattgacacccagccaagcagacagctgcgggtgcccaagcccttgctgggcctgcgcgtgaggagtcccactgcttctaaaggaagtcctgggcaggaggtggctttggtggttggttccaaagttgaaaatgcttgcagtttgaccttagaagaagtgggaagaagaaggagctctacagggtcagctttgtttgatttgtccagtctaagaagtcccattgccaaagctttctgcaggagggtgaatgccgcagcttggcagcccctgggtttctcttggaaatggtcagtttcccctcaaagtacccaaagtagccttggcttgagtttttgtccttgcctcctttttagagaagagggcatttagactgcattttcctggttaaagaaggttaaagcaaatgtttattgccttttctagtgaactaactcgtagagatgttctcagcaggaagacagtcttagcactgtcacttagcagattgcacttaagtcccttgtgctggccagatggcgtggctggttgccttaatatgtcccaggacccctgacagggctgcctggcctctccctcgtgctcctcaagagcccagtccatacactgtggatgtcattgctgtcgggttaggaagtcttgtcctagaacgccctggctggtatgaccacagttcatggcggctcttctcgcttgggtcatggtcatcttccagcacctgctgtgctgggaaggccgaggatgggggcccagcactgtccaggcctgctggggcctggctgggagtcctgtgggcagcatggaacatgcagctgggcttcctgtgaccaggcaccctctggcactgttgcttgccctgtgccctggaccttttcctgcccttctccttcctctgctcccttggggctaccccttggcccctcctggtctgtgcaaactccctcagggagcccccctgccctgtagctctcgcttaacttcctaggggctgctgagcccacccagaggttgttggagttcagcggggcagcttgtctcccttgtcagcaggggcgtaagggctgggtttggccatacaaggttggctacgccctcaatccctgaccgttccaggcactgagctgggcacccacggaaggacatgctgtccagactgtgatgactgccagcacagggcatctcgggcttggctggtctgcgaggccttgcccctgtggaactctgggttcctgttttctcagtcttttttgcggctttgctgtggttggcagctgccgtactccaggcttgtgtcggccactcagatgagggctgtggtgcgagccagtgcaggagagctgcgcttgggattgtgccctctcctgtgtctgtcctccggacctacccaggtctccaccatcaggaccctgtctttgggtttagaagaccaagtatggggaaaaccaggcaccagcctctgcagcaatgggtccctctagcctgtggacaccagctgggggatccagggtcaggccccctcctctccccagtttccctctgctgtgggttctgggctgtcatgtctccaccacttaaggatgtctttacactgacttcaggatagatgttgggatgcctgggcatggccacatgttacatgtacagaactttgtctacagcacaaattaagttatataaacacagtgactggtatttaatgctgatctactataaggtattctatatttatatgacttcagagacgcgtatgtaataaaggacgccctccctccagtgtccacatccagttcaccccagagggtcgggcaggttgacatatttatttttgtctattctgtaggcttccatgtccagaatcctgcttaaggttttagggtaccttcagtactttttgcaataaaagtatttcctatccatttgg

SEQ ID NO: 751 - protein, 183 aa, Homo sapines
MERVQPLEENVGNAARPRFERNKLLLVASVIQGLGLLLCFTYICLHFSALQVSHRYPRIQSIKVQFTEYKKEKGFILTSQKEDEIMKVQNNSVIINCDGFYLISLKGYFSQEVNISLHYQKDEEPLFQLKKVRSVNSLMVASLTYKDKVYLNVTTDNTSLDDFHVNGGELILIHQNPGEFCVL

SEQ ID NO: 752 - DNA, 3510 bp, Homo sapiens
tcaatcgccttttatctctggccctgggacctttgcctattttctgattgataggctttgttttgtctttacctccttctttctggggaaaacttcagttttatcgcacgttccccttttccatatcttcatcttccctctacccagattgtgaagatggaaagggtccaacccctggaagagaatgtgggaaatgcagccaggccaagattcgagaggaacaagctattgctggtggcctctgtaattcagggactggggctgctcctgtgcttcacctacatctgcctgcacttctctgctcttcaggtatcacatcggtatcctcgaattcaaagtatcaaagtacaatttaccgaatataagaaggagaaaggtttcatcctcacttcccaaaaggaggatgaaatcatgaaggtgcagaacaactcagtcatcatcaactgtgatgggttttatctcatctccctgaagggctacttctcccaggaagtcaacattagccttcattaccagaaggatgaggagcccctcttccaactgaagaaggtcaggtctgtcaactccttgatggtggcctctctgacttacaaagacaaagtctacttgaatgtgaccactgacaatacctccctggatgacttccatgtgaatggcggagaactgattcttatccatcaaaatcctggtgaattctgtgtcctttgaggggctgatggcaatatctaaaaccaggcaccagcatgaacaccaagctgggggtggacagggcatggattcttcattgcaagtgaaggagcctcccagctcagccacgtgggatgtgacaagaagcagatcctggccctcccgcccccacccctcagggatatttaaaacttattttatataccagttaatcttatttatccttatattttctaaattgcctagccgtcacaccccaagattgccttgagcctactaggcacctttgtgagaaagaaaaaatagatgcctcttcttcaagatgcattgtttctattggtcaggcaattgtcataataaacttatgtcattgaaaacggtacctgactaccatttgctggaaatttgacatgtgtgtggcattatcaaaatgaagaggagcaaggagtgaaggagtggggttatgaatctgccaaaggtggtatgaaccaacccctggaagccaaagcggcctctccaaggttaaattgattgcagtttgcatattgcctaaatttaaactttctcatttggtgggggttcaaaagaagaatcagcttgtgaaaaatcaggacttgaagagagccgtctaagaaataccacgtgctttttttctttaccattttgctttcccagcctccaaacatagttaatagaaatttcccttcaaagaactgtctggggatgtgatgctttgaaaaatctaatcagtgacttaagagagattttcttgtatacagggagagtgagataacttattgtgaagggttagctttactgtacaggatagcagggaactggacatctcagggtaaaagtcagtacggattttaatagcctggggaggaaaacacattctttgccacagacaggcaaagcaacacatgctcatcctcctgcctatgctgagatacgcactcagctccatgtcttgtacacacagaaacattgctggtttcaagaaatgaggtgatcctattatcaaattcaatctgatgtcaaatagcactaagaagttattgtgccttatgaaaaataatgatctctgtctagaaataccatagaccatatatagtctcacattgataattgaaactagaagggtctaatatcagcctatgccagggcttcaatggaatagtatccccttatgtttagttgaaatgtccccttaacttgatataatgtgttatgcttatggcgctgtggacaatctgatttttcatgtcaactttccagatgatttgtaacttctctgtgccaaaccttttataaacataaatttttgagatatgtattttaaaattgtagcacatgtttccctgacattttcaatagaggatacaacatcacagaatctttctggatgattctgtgttatcaaggaattgtactgtgctacaattatctctagaatctccagaaaggtggagggctgttcgcccttacactaaatggtctcagttggatttttttttcctgttttctatttcctcttaagtacaccttcaactatattcccatccctctattttaatctgttatgaaggaaggtaaataaaaatgctaaatagaagaaattgtaggtaaggtaagaggaatcaagttctgagtggctgccaaggcactcacagaatcataatcatggctaaatatttatggagggcctactgtggaccaggcactgggctaaatacttacatttacaagaatcattctgagacagatattcaatgatatctggcttcactactcagaagattgtgtgtgtgtttgtgtgtgtgtgtgtgtgtgtatttcactttttgttattgaccatgttctgcaaaattgcagttactcagtgagtgatatccgaaaaagtaaacgtttatgactataggtaatatttaagaaaatgcatggttcatttttaagtttggaatttttatctatatttctcacagatgtgcagtgcacatgcaggcctaagtatatgttgtgtgtgttgtttgtctttgatgtcatggtcccctctcttaggtgctcactcgctttgggtgcacctggcctgctcttcccatgttggcctctgcaaccacacagggatatttctgctatgcaccagcctcactccaccttccttccatcaaaaatatgtgtgtgtgtctcagtccctgtaagtcatgtccttcacagggagaattaacccttcgatatacatggcagagttttgtgggaaaagaattgaatgaaaagtcaggagatcagaattttaaatttgacttagccactaactagccatgtaaccttgggaaagtcatttcccatttctgggtcttgcttttctttctgttaaatgagaggaatgttaaatatctaacagtttagaatcttatgcttacagtgttatctgtgaatgcacatattaaatgtctatgttcttgttgctatgagtcaaggagtgtaaccttctcctttactatgttgaatgtatttttttctggacaagcttacatcttcctcagccatctttgtgagtccttcaagagcagttatcaattgttagttagatattttctatttagagaatgcttaagggattccaatcccgatccaaatcataatttgttcttaagtatactgggcaggtcccctattttaagtcataattttgtatttagtgctttcctggctctcagagagtattaatattgatattaataatatagttaatagtaatattgctatttacatggaaacaaataaaagatctcagaattcactaaaaaaaaaaaaaaaaaa

SEQ ID NO: 753 - protein, 508 aa, Homo sapiens
RQLLSYALIHPATSLEDRSALAMWLNHLEDRTSTSFGGQNRGRSDSVDYGQTHYYHQRQNSDDKLNGWQNSRDSGICINASNWQDKSMGCENGHVPLYSSSSVPTTINTIGTSTSTNVPAWLKSLRLHKYAALFSQMTYEEMMALTECQLEAQNVTKGARHKIVISIQKLKERQNLLKSLERDIIEGGSLRIPLQELHQMILTPIKAYSSPSTTPEARRREPQAPRQPSLMGPESQSPDCKDGAAATGATATPSAGASGGLQPHQLSSCDGELAVAPLPEGDLPGQFTRVMGKVCTQLLVSRPDEENISSYLQLIDKCLIHEAFTETQKKRLLSWKQQVQKLFRSFPRKTLLDISGYRQQRNRGFGQSNSLPTAGSVGGGMGRRNPRQYQIPSRNVPSARLGLLGTSGFVSSNQRNTTATPTIMKQGRQNLWFANPGGSNSMPSRTHSSVQRTRSLPVHTSPQNMLMFQQPEFQLPVTEPDINNRLESLCLSMTEHALGDGVDRTSTI

SEQ ID NO: 754 - DNA, 5896 bp, Homo sapiens
gcaggcagctgctgtcctatgctttgatacatccagccacttcgttagaagaccgtagtgctttagccatgtggctgaatcacttggaggaccgcacgtcgaccagctttggtggccagaaccgaggccgctcagactctgtggattatggacagacacactactatcaccaaagacagaactctgatgacaagctcaatgggtggcagaactctcgggattctgggatttgcatcaatgcctccaactggcaggacaaaagcatggggtgtgagaatggccatgtgcccctctactcctcctcatctgtccccaccacaatcaatacgattggaaccagcacaagtacaaatgttccagcctggctgaaaagcctccgcctgcacaaatatgccgcgcttttctcccagatgacctatgaggagatgatggccctcaccgagtgccagctggaggcgcagaatgttaccaaaggtgcaagacacaaaattgtcatcagtattcagaagctcaaagaaagacaaaatctcctgaagtctttggaaagggacatcatcgaggggggcagcctgcgcatcccgctccaggaactgcaccagatgatcctgactccgatcaaggcctacagctccccgagcaccacccccgaggctcgccgccgggagccccaggccccgcgtcagccctcactgatgggccccgagagccagagccccgactgcaaagatggggccgcagccactggcgccacggccaccccctcggccggggccagcggggggctccagccgcaccagctgagcagctgcgatggggagctggccgtcgcccccctgccagagggggacctccccgggcagttcacacgcgtcatggggaaagtgtgcacacagctcttggtctccagacctgatgaggaaaatataagttcctatttacagctcatagacaagtgtctaattcatgaggcatttacagagacacagaaaaaaagattgttgtcatggaaacagcaggtgcagaagctctttcggtctttccctcggaaaacccttctagacatatcaggatatcgacagcaaagaaatcgaggctttgggcaatccaactccctcccgacggctggctctgtgggcggtggcatgggcagacggaacccgcgccagtaccagatcccctctcggaacgtcccttccgcccgcctgggcctcttgggcaccagtggattcgtcagctccaaccagcgcaacaccacagctacccccaccatcatgaaacaaggaagacagaacctgtggtttgccaaccccgggggcagcaatagcatgccaagccgcacccacagctcagtccagaggacccgctcgctgcccgtgcacacttccccacagaacatgctgatgttccagcagccagaattccagcttcccgtgaccgaacctgacatcaacaacaggctggagtcgttgtgcctcagtatgaccgaacacgccctgggagacggggttgaccggacctccaccatctagaagctgaagacgagagtgaccgcgctggccgtgaaatcgactgctgcgggtccagtgtccgccatcttcagggttgcacagaatcctccaagatactttgcagccttttttccccctggtccctctcccgttttgattttgtgagagcgtaggtcatcctcgtaaacatatcagtagacctggggttggttattttgtcatttgtttctgtcatgggatggtttggtgtgtggggtggggaggggtctctagggaattatgagactgggaggggggtggagggaatgcaggtagctctctggatggaacggggacaggggaaagagtactgccatgaaagagataggagacacataagaggacagcagaagccctggccctggggaggcttctcggaaggcctggcttcacaggcaggccacagaaggatatcgcgggcacgtgcacccaaagcaagatagtggcttcccttttatatccaatctaatcctgattggatgtccctgaggcccctgctggaaacagccataggagagggcccatggcagtaggggaaagaaggaagaaattccctgcaacaaaacttcagctaaactttgatttgtgtattgtttacataataattttaaagggtacataatgtgtaaagagtttggatagaacctctcttcatactatggttttcgtaaaggatctgttgttgttacggattcattttttccctctatttttataagagcagcagagttgtcttctcaaaacggctgccaagctctgcttcttgggaagatggatgcagtcatgtaggcctgagctgtccgtctttcaccgttaggtgggaggagcgtatgggtggacttgaaggacatggacgtggctggaatgagcacagcattgggtgagcgcacaaggatgaggacatcatgtgatcagttatgggtttgctcgcagggcacccagagattctcaaagaatcctgcagcctctttctgtgctggatttgcttgtcacggagaggcctccctccctttccaccccacccatggggcattatcctgtcactcccagccttgctccacacacacacaggtgggtacaagttccactggaggagaaaaggcaaggatggactttttccccttgtgagaggtttgatacccagaaaatgagctcaaaacctttacattagggttgcttgtaggaactggagcctggaggctgcatctacttcacctgtcactgctgagggagaggaggggagaaaggcccagcaacagcgtacagaggggtcagtcagcaagtccagagagcacatgcagggagatgtttggcccacaccgcacagccccgccatctccagtgggcgatgaaagatgtaggaaaggttgatttcaagatggaaatgacagcgctatccgcacagtatgaattagggatttgctgtgttagttgatttatccatccacacagaggggaggaaaaagacactcgttacttggtgggagattgagaaactgtggtacctaccacaaagtaatagctctgtttatgaagggcaagaaaggctacatttcagaatttgacacagtggagggtattagaggaaatcaaagaggagttgtgtggaaaatcaggttgtgtaaatgaaggtatgaatgctcagccagaggcaagatcagggagatggtacaaggcctgtttgttacatggatgagtcgggtgcctggttgtgtgtgtgtgtgtgtgtgtgtgtgtgtgtgtgtgaagtcagagttgaaattcagaagatcagactatggaaatcactgcccttttttttttaaaagctaatgaactacatacagacctaaaaggccttaatgaaatccgaacaattttcttttactttcaagatcaaaaacatgcacccaacccagccttggatgccaccaccaggtttttgaagcccttttgagtctaagaaggtgagaacaatgtaaccatagaaagcctttcgtgagcagagaaggcttgaatccacaatttcattcgctgaattaaaaaaaaaaggttcagacctctccttgggtgactaagttctaaagatgcaaatccatgtgcagaaagagatggcattttttagttgattatttttaaccaagtgccattaacattcatcccccacatcccttttctaaacaagcttagtgttacttggggaatgtgttgggatggacgatcacatgtaaggcaggaagaataggtcaaaggttgaaggccaaaggtaagaccagagggtttgcgaatgtgggtttgtaggatactgagaaagtgaataaagaggagaaaaaaccatggtattacacatcttgctgagaaaggaaagcattcggatctgctgcaaaaacacatatatccataaagactcatgttattcagaaaacagattgtgaacacaatcacattcgcatgaatcctttaaaaggaagaagaccttaaagtatctgcaaatctgaatttctatttattccttcactgaatatagaaacaatggttatctgattattagagatattattttggatatgttacttattaacttgctatggctggtaaccatgataaagtctgttattaataacaacataattctttttttaaaaaagaaaagcttatttttcattgacagtgtatagatttatctacttagttgtgttttgctattagtgttttaattttttttttaagttgagtgtttgataaattttaagaccctgtccccaccttgttttgagtcctgtgttgactacaggtatatagctcaatttaaaaatcctaaagcaaaagaattttatttataaaagaatcaaacagttgcatgcatgaggctgtgaagtcagatatttagtaataaaagcagcagtgcctttttttgtatttacccattgacccccaccaaatgcaactgttttatattaagaaaatagtaacaattttaaaatctcagagtaaaatctatttcactacatgcttttccccccttgttctgatttaagcagtgtgtacttggcatctctacattgtcctagggacagtggtgttctacaatattatcatgtatgatgttttattggtgctttttattcatagtggcttcttaccagaaacagtaggaagaaacacatgaactgtgtacaagacatgaaacattgctgctgatatgttgttttttcacatgcttttgagttttcactttttaaacgagagccagcaagcaaaatagatgtggctgggtctgcctgtccgggcggctctttgcaccgagctctcaaatcctgtgtattgagggttcctttttggtactcaggattggagctacagctgggcccccctctctcccattcgtttgaagagacactgagggaaacaagggtttcttttgaggtgtccttggctgccttttacgggatgggagccttctccggatcttttgttcttctgcacctcttgtagctactgccggtgcaaggttgtagatgttattccccaggagcctgggcttgggggctgagctgggctgaatgcaaaagcatgcaaccagaaggcgggcaaggggaggaaaagcaggcctggcctcattggtcccctggagatgtctgtagcagtcagctccagcttgggcctggggaagcagcctgaccaaggcgctcaggtgtgcctgttacaagaagaacctgcagaaggataatttgcacatggagctgtgataacactaatgttgattttttttttttttacaagtcatcagagatgtttgcaaagtgagttttatttttttgtaattcctttatctttacttaaaggtgaatgtgtattcctctgggaggaataggaagaaaacaggaatgttaataatgtcgaacagaaaacttcctcccttattaatatataatcctcatgtatttatgcctaatgtaagctgacttttaaaaagctttcttttgttgcatgccctgtgcaggcatctgtattgtacatgcatgcctttcgtcctgttttcctgtataaagttagtgaacaaagaaatatttttgcctagttcatgttgccaagcaatgcatattttttaaatttgtcatatatggaaagagcatgtttgttacatgtaaaagctttactgatatacagatatactaatgtttgaagatgctgttctttgcaagtgtacagttttcaaatgttgttaccagtgaaacacccttgtggtttaaacttgctacaatgtatttattattcatttcctcccatgtaactaagaatcatggctatatttcatatcaacgttatattgaaagtgaagggaaatgattaatacaaggttttgtaac

SEQ ID NO: 755 - protein, 274 aa, Homo sapiens
MVGRRALIVLAHSERTSFNYAMKEAAAAALKKKGWEVVESDLYAMNFNPIISRKDITGKLKDPANFQYPAESVLAYKEGHLSPDIVAEQKKLEAADLVIFQFPLQWFGVPAILKGWFERVFIGEFAYTYAAMYDKGPFRSKKAVLSITTGGSGSMYSLQGIHGDMNVILWPIQSGILHFCGFQVLEPQLTYSIGHTPADARIQILEGWKKRLENIWDETPLYFAPSSLFDLNFQAGFLMKKEVQDEEKNKKFGLSVGHHLGKSIPTDNQIKARK

SEQ ID NO: 756 - DNA, 2101 bp, Homo sapiens
gagagagacgctagctctgaactgattctctagtgtgcctgaggcctccttatcagagtgtcttactgagaagcccagaccaacttctgttgttatagtacaactgcatggaattggttgacttacctctctgtgctttctgtatcctcagagtggcattctgcatttctgtggcttccaagtcttagaacctcaactgacatatagcattgggcacactccagcagacgcccgaattcaaatcctggaaggatggaagaaacgcctggagaatatttgggatgagacaccactgtattttgctccaagcagcctctttgacctaaacttccaggcaggattcttaatgaaaaaagaggtacaggatgaggagaaaaacaagaaatttggcctttctgtgggccatcacttgggcaagtccatcccaactgacaaccagatcaaagctagaaaatgagattccttagcctggatttccttctaacatgttatcaaatctgggtatctttccaggcttccctgacttgctttagtttttaagatttgtgtttttctttttccacaaggaataaatgagagggaatcgaccgtattcgtgcatttttggatgcatttttaactgattcttatgattactatcatggcatataaccaaaatccgactgggctcaagaggccacttagggaaagatgtagaaagatgctagaaaaatgttctttaaaggcatctacacaatttaattcctctttttagggctaaagttttagggtacagtttggctaggtatcattcaactctccaatgttctattaatcacctctctgtagtttatggcagaagggaattgctcagagaaggtaaaagactgaatctacctgccctaagggacttaacttgtttggtagttagccatctaatgcttgtttatgatatttcttgctttcaattacaaagcagttactaatatgcctagcacaagtaccactcttggtcagcttttgttgtttatatacagtacacagataccttgaaaggaagagctaataaatctcttctttgctgcagtcatctactttttttttaattaaaaaaaatttttttttgaagcagtcttgctctgttacccaggctggagtgcagtggtgtgatctcggctcactgcaacctctgcctcccaggttccagcaattctcctgcctcagcctccctagtagctgggatgacaggcgcctgccatcatgcctgactaatttttgtatttttagtagagacggcgtttcaccatgttggccaggctggtctcaaactcctgacctcaggtgatccgcctacctcagcctcccaaagtgctgggattacaggcgtgactccaccacacctggcccttgcaatcttctactttaaggtttgcagagataaaccaataaatccacaccgtacatctgcaatatgaattccaagaaaggaaatagtaccttcaatacttaaaaatagtcttccacaaaaaatactttatttctgatctatacaaattttcagaaggttattttctttatcattgctaaactgatgacttaccatgggatggggtccagtcccatgaccttggggtacaattgtaaacctagagttttatcaactttggtgaacagttttggcataatagtcaatttctacttctggaagtcatctcattccactgttggtattatataattcaaggagaatatgataaaacactgccctcttgtggtgcattgaaagaagagatgagaaatgatgaaaaggttgcctgaaaaatgggagacagcctcttacttgccaagaaaatgaagggattggaccgagctggaaaacctcctttaccagatgctgactggcactggtggtttttgctctcgacagtatccacaatagctgacggctgggtgtttcagtttgaaaatattttgttgccttcatcttcactgcaattttgtgtaaatttctcaaagatctgaattaaataaataaaattcatttctacagacccacactcattggtatcagtgaagctaatgatagtggaatctagtgggaggcagatccgttgacctgcag

SEQ ID NO: 757 - protein, 464 aa, Homo sapiens
MGSPAHRPALLLLLPPLLLLLLLRVPPSRSFPGSGDSPLEDDEVGYSHPRYKDTPWCSPIKVKYGDVYCRAPQGGYYKTALGTRCDIRCQKGYELHGSSLLICQSNKRWSDKVICKQKRCPTLAMPANGGFKCVDGAYFNSRCEYYCSPGYTLKGERTVTCMDNKAWSGRPASCVDMEPPRIKCPSVKERIAEPNKLTVRVSWETPEGRDTADGILTDVILKGLPPGSNFPEGDHKIQYTVYDRAENKGTCKFRVKVRVKRCGKLNAPENGYMKCSSDGDNYGATCEFSCIGGYELQGSPARVCQSNLAWSGTEPTCAAMNVNVGVRTAAALLDQFYEKRRLLIVSTPTARNLLYRLQLGMLQQAQCGLDLRHITVVELVGVFPTLIGRIGAKIMPPALALQLRLLLRIPLYSFSMVLVDKHGMDKERYVSLVMPVALFNLIDTFPLRKEEMVLQAEMSQTCNT

SEQ ID NO: 758 - DNA, 1999 bp, Homo sapiens
gagcacgcagtcccttggtctcttcggtctcctgccgcccccgggaagcgcgctgcgctgccgaggcgagctaagcgcccgctcgccatggggagccccgcacatcggcccgcgctgctgctgctgctgccgcctctgctgctgctgctgctgctgcgcgtcccgcccagccgcagcttcccaggatcgggagactcaccactagaagacgatgaagtcgggtattcacaccctagatataaagataccccgtggtgctcccccatcaaggtgaagtatggggatgtgtactgcagggcccctcaaggaggatactacaaaacagccctgggaaccaggtgcgacattcgctgccagaagggctacgagctgcatggctcttccctactgatctgccagtcaaacaaacgatggtctgacaaggtcatctgcaaacaaaagcgatgtcctacccttgccatgccagcaaatggagggtttaagtgtgtagatggtgcctactttaactcccggtgtgagtattattgttcaccaggatacacgttgaaaggggagcggaccgtcacatgtatggacaacaaggcctggagcggccggccagcctcctgtgtggatatggaacctcctagaatcaagtgcccaagtgtgaaggaacgcattgcagaacccaacaaactgacagtccgggtgtcctgggagacacccgaaggaagagacacagcagatggaattcttactgatgtcattctaaaaggcctccccccaggctccaactttccagaaggagaccacaagatccagtacacagtctatgacagagctgagaataagggcacttgcaaatttcgagttaaagtaagagtcaaacgctgtggcaaactcaatgccccagagaatggttacatgaagtgctccagcgacggtgataattatggagccacctgtgagttctcctgcatcggcggctatgagctccagggtagccctgcccgagtatgtcaatccaacctggcttggtctggcacggagcccacctgtgcagccatgaacgtcaatgtgggtgtcagaacggcagctgcacttctggatcagttttatgagaaaaggagactcctcattgtgtccacacccacagcccgaaacctcctttaccggctccagctaggaatgctgcagcaagcacagtgtggccttgatcttcgacacatcaccgtggtggagctggtgggtgtgttcccgactctcattggcaggataggagcaaagattatgcctccagccctagcgctgcagctcaggctgttgctgcgaatcccactctactccttcagtatggtgctagtggataagcatggcatggacaaagagcgctatgtctccctggtgatgcctgtggccctgttcaacctgattgacacttttcccttgagaaaagaagagatggtcctacaagccgaaatgagccagacctgtaacacctgacatgatggttcctctcttggcaattcctcttcattgtctacatagtgacatgcacacgggaaagccttaaaaatatccttgatgtacagattttatttgtaattttaaaagtctattttattatgagctttctttgcacttaaaaattagcatgctgctttttgtacttggaagtgtttcaaaaaattatatgaccatatttactctttctaactttctttactccatcatggctggttgattttgtagagaaattagaacccataaccatacacaggctatcaacatgttattcaatgtgacacctaactcttttctattttgttttttaagtaagacttttattaataaaacaaaatgttttggagcaaaaaaaaaaaaaaaaaaaaaaaaaaaaaaaaaaaaaaaaaaaaaaaaaaaaaaaaaaaaaaaaaaaaaaaaaaaaaaaaaaaaaaaaaaaaaaaaaaaaaaaaaaaaaaaaaaaaaaaaaaaaaaaaaaaaaaaaaaaaaaaaaaaa

SEQ ID NO: 759 - protein, 1049 aa, Homo sapiens
MGSRTPESPLHAVQLRWGPRRRPPLVPLLLLLVPPPPRVGGFNLDAEAPAVLSGPPGSFFGFSVEFYRPGTDGVSVLVGAPKANTSQPGVLQGGAVYLCPWGASPTQCTPIEFDSKGSRLLESSLSSSEGEEPVEYKSLQWFGATVRAHGSSILACAPLYSWRTEKEPLSDPVGTCYLSTDNFTRILEYAPCRSDFSWAAGQGYCQGGFSAEFTKTGRVVLGGPGSYFWQGQILSATQEQIAESYYPEYLINLVQGQLQTRQASSIYDDSYLGYSVAVGEFSGDDTEDFVAGVPKGNLTYGYVTILNGSDIRSLYNFSGEQMASYFGYAVAATDVNGDGLDDLLVGAPLLMDRTPDGRPQEVGRVYVYLQHPAGIEPTPTLTLTGHDEFGRFGSSLTPLGDLDQDGYNDVAIGAPFGGETQQGVVFVFPGGPGGLGSKPSQVLQPLWAASHTPDFFGSALRGGRDLDGNGYPDLIVGSFGVDKAVVYRGRPIVSASASLTIFPAMFNPEERSCSLEGNPVACINLSFCLNASGKHVADSIGFTVELQLDWQKQKGGVRRALFLASRQATLTQTLLIQNGAREDCREMKIYLRNESEFRDKLSPIHIALNFSLDPQAPVDSHGLRPALHYQSKSRIEDKAQILLDCGEDNICVPDLQLEVFGEQNHVYLGDKNALNLTFHAQNVGEGGAYEAELRVTAPPEAEYSGLVRHPGNFSSLSCDYFAVNQSRLLVCDLGNPMKAGASLWGGLRFTVPHLRDTKKTIQFDFQILSKNLNNSQSDVVSFRLSVEAQAQVTLNGVSKPEAVLFPVSDWHPRDQPQKEEDLGPAVHHVYELINQGPSSISQGVLELSCPQALEGQQLLYVTRVTGLNCTTNHPINPKGLELDPEGSLHHQQKREAPSRSSASSGPQILKCPEAECFRLRCELGPLHQQESQSLQLHFRVWAKTFLQREHQPFSLQCEAVYKALKMPYRILPRQLPQKERQVATAVQWTKAEGSYGVPLWIIILAILFGLLLLGLLIYILYKLGFFKRSLPYGTAMEKAQLKPPATSDA

SEQ ID NO: 760 - DNA, 4204 bp, Homo sapiens
caggacagggaagagcgggcgctatggggagccggacgccagagtcccctctccacgccgtgcagctgcgctggggcccccggcgccgacccccgctcgtgccgctgctgttgctgctcgtgccgccgccacccagggtcgggggcttcaacttagacgcggaggccccagcagtactctcggggcccccgggctccttcttcggattctcagtggagttttaccggccgggaacagacggggtcagtgtgctggtgggagcacccaaggctaataccagccagccaggagtgctgcagggtggtgctgtctacctctgtccttggggtgccagccccacacagtgcacccccattgaatttgacagcaaaggctctcggctcctggagtcctcactgtccagctcagagggagaggagcctgtggagtacaagtccttgcagtggttcggggcaacagttcgagcccatggctcctccatcttggcatgcgctccactgtacagctggcgcacagagaaggagccactgagcgaccccgtgggcacctgctacctctccacagataacttcacccgaattctggagtatgcaccctgccgctcagatttcagctgggcagcaggacagggttactgccaaggaggcttcagtgccgagttcaccaagactggccgtgtggttttaggtggaccaggaagctatttctggcaaggccagatcctgtctgccactcaggagcagattgcagaatcttattaccccgagtacctgatcaacctggttcaggggcagctgcagactcgccaggccagttccatctatgatgacagctacctaggatactctgtggctgttggtgaattcagtggtgatgacacagaagactttgttgctggtgtgcccaaagggaacctcacttacggctatgtcaccatccttaatggctcagacattcgatccctctacaacttctcaggggaacagatggcctcctactttggctatgcagtggccgccacagacgtcaatggggacgggctggatgacttgctggtgggggcacccctgctcatggatcggacccctgacgggcggcctcaggaggtgggcagggtctacgtctacctgcagcacccagccggcatagagcccacgcccacccttaccctcactggccatgatgagtttggccgatttggcagctccttgacccccctgggggacctggaccaggatggctacaatgatgtggccatcggggctccctttggtggggagacccagcagggagtagtgtttgtatttcctgggggcccaggagggctgggctctaagccttcccaggttctgcagcccctgtgggcagccagccacaccccagacttctttggctctgcccttcgaggaggccgagacctggatggcaatggatatcctgatctgattgtggggtcctttggtgtggacaaggctgtggtatacaggggccgccccatcgtgtccgctagtgcctccctcaccatcttccccgccatgttcaacccagaggagcggagctgcagcttagaggggaaccctgtggcctgcatcaaccttagcttctgcctcaatgcttctggaaaacacgttgctgactccattggtttcacagtggaacttcagctggactggcagaagcagaagggaggggtacggcgggcactgttcctggcctccaggcaggcaaccctgacccagaccctgctcatccagaatggggctcgagaggattgcagagagatgaagatctacctcaggaacgagtcagaatttcgagacaaactctcgccgattcacatcgctctcaacttctccttggacccccaagccccagtggacagccacggcctcaggccagccctacattatcagagcaagagccggatagaggacaaggctcagatcttgctggactgtggagaagacaacatctgtgtgcctgacctgcagctggaagtgtttggggagcagaaccatgtgtacctgggtgacaagaatgccctgaacctcactttccatgcccagaatgtgggtgagggtggcgcctatgaggctgagcttcgggtcaccgcccctccagaggctgagtactcaggactcgtcagacacccagggaacttctccagcctgagctgtgactactttgccgtgaaccagagccgcctgctggtgtgtgacctgggcaaccccatgaaggcaggagccagtctgtggggtggccttcggtttacagtccctcatctccgggacactaagaaaaccatccagtttgacttccagatcctcagcaagaatctcaacaactcgcaaagcgacgtggtttcctttcggctctccgtggaggctcaggcccaggtcaccctgaacggtgtctccaagcctgaggcagtgctattcccagtaagcgactggcatccccgagaccagcctcagaaggaggaggacctgggacctgctgtccaccatgtctatgagctcatcaaccaaggccccagctccattagccagggtgtgctggaactcagctgtccccaggctctggaaggtcagcagctcctatatgtgaccagagttacgggactcaactgcaccaccaatcaccccattaacccaaagggcctggagttggatcccgagggttccctgcaccaccagcaaaaacgggaagctccaagccgcagctctgcttcctcgggacctcagatcctgaaatgcccggaggctgagtgtttcaggctgcgctgtgagctcgggcccctgcaccaacaagagagccaaagtctgcagttgcatttccgagtctgggccaagactttcttgcagcgggagcaccagccatttagcctgcagtgtgaggctgtgtacaaagccctgaagatgccctaccgaatcctgcctcggcagctgccccaaaaagagcgtcaggtggccacagctgtgcaatggaccaaggcagaaggcagctatggcgtcccactgtggatcatcatcctagccatcctgtttggcctcctgctcctaggtctactcatctacatcctctacaagcttggattcttcaaacgctccctcccatatggcaccgccatggaaaaagctcagctcaagcctccagccacctctgatgcctgagtcctcccaatttcagactcccattcctgaagaaccagtccccccaccctcattctactgaaaaggaggggtctgggtacttcttgaaggtgctgacggccagggagaagctcctctccccagcccagagacatacttgaagggccagagccaggggggtgaggagctggggatccctcccccccatgcactgtgaaggacccttgtttacacataccctcttcatggatgggggaactcagatccagggacagaggcccagcctccctgaagcctttgcattttggagagtttcctgaaacaactggaaagataactaggaaatccattcacagttctttgggccagacatgccacaaggacttcctgtccagctccaacctgcaaagatctgtcctcagccttgccagagatccaaaagaagcccccagtaagaacctggaacttggggagttaagacctggcagctctggacagccccaccctggtgggccaacaaagaacactaactatgcatggtgccccaggaccagctcaggacagatgccacaaggatagatgctggcccagggccagagcccagctccaaggggaatcagaactcaaatggggccagatccagcctggggtctggagttgatctggaacccagactcagacattggcaccaatccaggcagatccaggactatatttgggcctgctccagacctgatcctggaggcccagttcaccctgatttaggagaagccaggaatttcccaggacctgaaggggccatgatggcaacagatctggaacctcagcctggccagacacaggccctccctgttccccagagaaaggggagcccactgtcctgggcctgcagaatttgggttctgcctgccagctgcactgatgctgcccctcatctctctgcccaacccttccctcaccttggcaccagacacccaggacttatttaaactctgttgcaagtgcaataaatctgacccagtgcccccactgaccagaactagaaaaaaaaa

SEQ ID NO: 761 - protein, 457 aa, Homo sapiens
MDSFKVVLEGPAPWGFRLQGGKDFNVPLSISRLTPGGKAAQAGVAVGDWVLSIDGENAGSLTHIEAQNKIRACGERLSLGLSRAQPVQSKPQKASAPAADPPRYTFAPSVSLNKTARPFGAPPPADSAPQQNGQPLRPLVPDASKQRLMENTEDWRPRPGTGQSRSFRILAHLTGTEFMQDPDEEHLKKSSQVPRTEAPAPASSTPQEPWPGPTAPSPTSRPPWAVDPAFAERYAPDKTSTVLTRHSQPATPTPLQSRTSIVQAAAGGVPGGGSNNGKTPVCHQCHKVIRGRYLVALGHAYHPEEFVCSQCGKVLEEGGFFEEKGAIFCPPCYDVRYAPSCAKCKKKITGEIMHALKMTWHVHCFTCAACKTPIRNRAFYMEEGVPYCERDYEKMFGTKCHGCDFKIDAGDRFLEALGFSWHDTCFVCAICQINLEGKTFYSKKDRPLCKSHAFSHV

SEQ ID NO: 762 - DNA, 1706 bp, Homo sapiens
cccaacgaggctccctggagccgacgcagagcagcgccctggccgggccaagcaggagccggcatcatggattccttcaaagtagtgctggaggggccagcaccttggggcttccggctgcaagggggcaaggacttcaatgtgcccctctccatttcccggctcactcctgggggcaaagcggcgcaggccggagtggccgtgggtgactgggtgctgagcatcgatggcgagaatgcgggtagcctcacacacatcgaagctcagaacaagatccgggcctgcggggagcgcctcagcctgggcctcagcagggcccagccggttcagagcaaaccgcagaaggcctccgcccccgccgcggaccctccgcggtacacctttgcacccagcgtctccctcaacaagacggcccggccctttggggcgcccccgcccgctgacagcgccccgcagcagaatggacagccgctccgaccgctggtcccagatgccagcaagcagcggctgatggagaacacagaggactggcggccgcggccggggacaggccagtcgcgttccttccgcatccttgcccacctcacaggcaccgagttcatgcaagacccggatgaggagcacctgaagaaatcaagccaggtgcccaggacagaagccccagccccagcctcatctacaccccaggagccctggcctggccctaccgcccccagccctaccagccgcccgccctgggctgtggaccctgcgtttgccgagcgctatgccccggacaaaacgagcacagtgctgacccggcacagccagccagccacgcccacgccgctgcagagccgcacctccattgtgcaggcagctgccggaggggtgccaggagggggcagcaacaacggcaagactcccgtgtgtcaccagtgccacaaggtcatccggggccgctacctggtggcgctgggccacgcgtaccacccggaggagtttgtgtgtagccagtgtgggaaggtcctggaagagggtggcttctttgaggagaagggcgccatcttctgcccaccatgctatgacgtgcgctatgcacccagctgtgccaagtgcaagaagaagattacaggcgagatcatgcacgccctgaagatgacctggcacgtgcactgctttacctgtgctgcctgcaagacgcccatccggaacagggccttctacatggaggagggcgtgccctattgcgagcgagactatgagaagatgtttggcacgaaatgccatggctgtgacttcaagatcgacgctggggaccgcttcctggaggccctgggcttcagctggcatgacacctgcttcgtctgtgcgatatgtcagatcaacctggaaggaaagaccttctactccaagaaggacaggcctctctgcaagagccatgccttctctcatgtgtgagccccttctgcccacagctgccgcggtggcccctagcctgaggggcctggagtcgtggccctgcatttctgggtagggctggcaatggttgccttaaccctggctcctggcccgagcctgggctccctggccctgccccacccacctttcctcccaccccactccctccaccaccacagcacaccggtgctggccacaccagccccctttcacctccagtgccacaataaacctgtacccagctgaaaaaaaaaaaaaaaaaaaaa

SEQ ID NO: 763 - protein, 517 aa, Homo sapiens
MKGTKDLTSQQKESNVKTFCSKNILAILGFSSIIAVIALLAVGLTQNKALPENVKYGIVLDAGSSHTSLYIYKWPAEKENDTGVVHQVEECRVKGPGISKFVQKVNEIGIYLTDCMERAREVIPRSQHQETPVYLGATAGMRLLRMESEELADRVLDVVERSLSNYPFDFQGARIITGQEEGAYGWITINYLLGKFSQKTRWFSIVPYETNNQETFGALDLGGASTQVTFVPQNQTIESPDNALQFRLYGKDYNVYTHSFLCYGKDQALWQKLAKDIQVASNEILRDPCFHPGYKKVVNVSDLYKTPCTKRFEMTLPFQQFEIQGIGNYQQCHQSILELFNTSYCPYSQCAFNGIFLPPLQGDFGAFSAFYFVMKFLNLTSEKVSQEKVTEMMKKFCAQPWEEIKTSYAGVKEKYLSEYCFSGTYILSLLLQGYHFTADSWEHIHFIGKIQGSDAGWTLGYMLNLTNMIPAEQPLSTPLSHSTYVFLMVLFSLVLFTVAIIGLLIFHKPSYFWKDMV

SEQ ID NO: 764 - DNA, 2081 bp, Homo sapiens
cccgggtgtacgtgtaaaattatgatcaaataaatttgtatgccttttctcctattaacctgccttttttgtcagcgattgtcagtgaaacttcagagggcaaaggggaagttttccttggcccctccagttttggtgctgtgaacaggataccaaagctgctctgttcttctggaagctgcaatgaagggaaccaaggacctgacaagccagcagaaggagtctaacgtgaagacattttgctccaagaatatcctagccatccttggcttctcctctatcatagctgtgatagctttgcttgctgtggggttgacccagaacaaagcattgccagaaaacgttaagtatgggattgtgctggatgcgggttcttctcacacaagtttatacatctataagtggccagcagaaaaggagaatgacacaggcgtggtgcatcaagtagaagaatgcagggttaaaggtcctggaatctcaaaatttgttcagaaagtaaatgaaataggcatttacctgactgattgcatggaaagagctagggaagtgattccaaggtcccagcaccaagagacacccgtttacctgggagccacggcaggcatgcggttgctcaggatggaaagtgaagagttggcagacagggttctggatgtggtggagaggagcctcagcaactacccctttgacttccagggtgccaggatcattactggccaagaggaaggtgcctatggctggattactatcaactatctgctgggcaaattcagtcagaaaacaaggtggttcagcatagtcccatatgaaaccaataatcaggaaacctttggagctttggaccttgggggagcctctacacaagtcacttttgtaccccaaaaccagactatcgagtccccagataatgctctgcaatttcgcctctatggcaaggactacaatgtctacacacatagcttcttgtgctatgggaaggatcaggcactctggcagaaactggccaaggacattcaggttgcaagtaatgaaattctcagggacccatgctttcatcctggatataagaaggtagtgaacgtaagtgacctttacaagaccccctgcaccaagagatttgagatgactcttccattccagcagtttgaaatccagggtattggaaactatcaacaatgccatcaaagcatcctggagctcttcaacaccagttactgcccttactcccagtgtgccttcaatgggattttcttgccaccactccagggggattttggggcattttcagctttttactttgtgatgaagtttttaaacttgacatcagagaaagtctctcaggaaaaggtgactgagatgatgaaaaagttctgtgctcagccttgggaggagataaaaacatcttacgctggagtaaaggagaagtacctgagtgaatactgcttttctggtacctacattctctccctccttctgcaaggctatcatttcacagctgattcctgggagcacatccatttcattggcaagatccagggcagcgacgccggctggactttgggctacatgctgaacctgaccaacatgatcccagctgagcaaccattgtccacacctctctcccactccacctatgtcttcctcatggttctattctccctggtccttttcacagtggccatcataggcttgcttatctttcacaagccttcatatttctggaaagatatggtatagcaaaagcagctgaaatatgctggctggagtgaggaaaaaatcgtccagggagcattttcctccatcgcagtgttcaaggccatccttccctgtctgccagggccagtcttgacgagtgtgaagcttccttggcttttactgaagcctttcttttggaggtattcaatatcctttgcctcaaggacttcggcagatactgtctctttcatgagtttttcccagctacacctttctcctttgtactttgtgcttgtataggttttaaagacctgacacctttcataatctttgctttataaaagaacaatattgactttgtctagaaaaaaaaaaaaaaaaaaaaa

SEQ ID NO: 765 - protein, 513 aa, Homo sapiens
MPGLGRRAQWLCWWWGLLCSCCGPPPLRPPLPAAAAAAAGGQLLGDGGSPGRTEQPPPSPQSSSGFLYRRLKTQEKREMQKEILSVLGLPHRPRPLHGLQQPQPPALRQQEEQQQQQQLPRGEPPPGRLKSAPLFMLDLYNALSADNDEDGASEGERQQSWPHEAASSSQRRQPPPGAAHPLNRKSLLAPGSGSGGASPLTSAQDSAFLNDADMVMSFVNLVEYDKEFSPRQRHHKEFKFNLSQIPEGEVVTAAEFRIYKDCVMGSFKNQTFLISIYQVLQEHQHRDSDLFLLDTRVVWASEEGWLEFDITATSNLWVVTPQHNMGLQLSVVTRDGVHVHPRAAGLVGRDGPYDKQPFMVAFFKVSEVHVRTTRSASSRRRQQSRNRSTQSQDVARVSSASDYNSSELKTACRKHELYVSFQDLGWQDWIIAPKGYAANYCDGECSFPLNAHMNATNHAIVQTLVHLMNPEYVPKPCCAPTKLNAISVLYFDDNSNVILKKYRNMVVRACGCH

SEQ ID NO: 766 - DNA, 2943 bp, Homo sapiens
gcaactgggggcgccccggacgaccatgagagataaggactgagggccaggaaggggaagcgagcccgccgagaggtggcggggactgctcacgccaagggccacagcggccgcgctccggcctcgctccgccgctccacgcctcgcgggatccgcgggggcagcccggccgggcggggatgccggggctggggcggagggcgcagtggctgtgctggtggtgggggctgctgtgcagctgctgcgggcccccgccgctgcggccgcccttgcccgctgccgcggccgccgccgccggggggcagctgctgggggacggcgggagccccggccgcacggagcagccgccgccgtcgccgcagtcctcctcgggcttcctgtaccggcggctcaagacgcaggagaagcgggagatgcagaaggagatcttgtcggtgctggggctcccgcaccggccccggcccctgcacggcctccaacagccgcagcccccggcgctccggcagcaggaggagcagcagcagcagcagcagctgcctcgcggagagccccctcccgggcgactgaagtccgcgcccctcttcatgctggatctgtacaacgccctgtccgccgacaacgacgaggacggggcgtcggagggggagaggcagcagtcctggccccacgaagcagccagctcgtcccagcgtcggcagccgcccccgggcgccgcgcacccgctcaaccgcaagagccttctggcccccggatctggcagcggcggcgcgtccccactgaccagcgcgcaggacagcgccttcctcaacgacgcggacatggtcatgagctttgtgaacctggtggagtacgacaaggagttctcccctcgtcagcgacaccacaaagagttcaagttcaacttatcccagattcctgagggtgaggtggtgacggctgcagaattccgcatctacaaggactgtgttatggggagttttaaaaaccaaacttttcttatcagcatttatcaagtcttacaggagcatcagcacagagactctgacctgtttttgttggacacccgtgtagtatgggcctcagaagaaggctggctggaatttgacatcacggccactagcaatctgtgggttgtgactccacagcataacatggggcttcagctgagcgtggtgacaagggatggagtccacgtccacccccgagccgcaggcctggtgggcagagacggcccttacgataagcagcccttcatggtggctttcttcaaagtgagtgaggtccacgtgcgcaccaccaggtcagcctccagccggcgccgacaacagagtcgtaatcgctctacccagtcccaggacgtggcgcgggtctccagtgcttcagattacaacagcagtgaattgaaaacagcctgcaggaagcatgagctgtatgtgagtttccaagacctgggatggcaggactggatcattgcacccaagggctatgctgccaattactgtgatggagaatgctccttcccactcaacgcacacatgaatgcaaccaaccacgcgattgtgcagaccttggttcaccttatgaaccccgagtatgtccccaaaccgtgctgtgcgccaactaagctaaatgccatctcggttctttactttgatgacaactccaatgtcattctgaaaaaatacaggaatatggttgtaagagcttgtggatgccactaactcgaaaccagatgctggggacacacattctgccttggattcctagattacatctgccttaaaaaaacacggaagcacagttggaggtgggacgatgagactttgaaactatctcatgccagtgccttattacccaggaagattttaaaggacctcattaataatttgctcacttggtaaatgacgtgagtagttgttggtctgtagcaagctgagtttggatgtctgtagcataaggtctggtaactgcagaaacataaccgtgaagctcttcctaccctcctcccccaaaaacccaccaaaattagttttagctgtagatcaagctatttggggtgtttgttagtaaatagggaaaataatctcaaaggagttaaatgtattcttggctaaaggatcagctggttcagtactgtctatcaaaggtagattttacagagaacagaaatcggggaagtggggggaacgcctctgttcagttcattcccagaagtccacaggacgcacagcccaggccacagccagggctccacggggcgcccttgtctcagtcattgctgttgtatgttcgtgctggagttttgttggtgtgaaaatacacttatttcagccaaaacataccatttctacacctcaatcctccatttgctgtactctttgctagtaccaaaagtagactgattacactgaggtgaggctacaaggggtgtgtaaccgtgtaacacgtgaaggcagtgctcacctcttctttaccagaacggttctttgaccagcacattaacttctggactgccggctctagtaccttttcagtaaagtggttctctgcctttttactatacagcataccacgccacagggttagaaccaacgaagaaaataaaatgagggtgcccagcttataagaatggtgttagggggatgagcatgctgtttatgaacggaaatcatgatttccctgtagaaagtgaggctcagattaaattttagaatattttctaaatgtctttttcacaatcatgtgactgggaaggcaatttcatactaaactgattaaataatacatttataatctacaactgtttgcacttacagctttttttgtaaatataaactataatttattgtctattttatatctgttttgctgtggcgttggggggggggccgggcttttgggggggggggtttgtttggggggtgtcgtggtgtgggcgggcgg

SEQ ID NO: 767 - protein, 264 aa, Homo sapiens
MESGFTSKDTYLSHFNPRDYLEKYYKFGSRHSAESQILKHLLKNLFKIFCLDGVKGDLLIDIGSGPTIYQLLSACESFKEIVVTDYSDQNLQELEKWLKKEPEAFDWSPVVTYVCDLEGNRVKGPEKEEKLRQAVKQVLKCDVTQSQPLGAVPLPPADCVLSTLCLDAACPDLPTYCRALRNLGSLLKPGGFLVIMDALKSSYYMIGEQKFSSLPLGREAVEAAVKEAGYTIEWFEVISQSYSSTMANNEGLFSLVARKLSRPL

SEQ ID NO: 768 - DNA, 952 bp, Homo sapiens
tgaactctggatgctgttagcctgagactcaggaagacaacttctgcagggtcactccctggcttctggaggaaagagaaggagggcagtgctccagtggtacagaagtgagacataatggaatcaggcttcacctccaaggacacctatctaagccattttaaccctcgggattacctagaaaaatattacaagtttggttctaggcactctgcagaaagccagattcttaagcaccttctgaaaaatcttttcaagatattctgcctagacggtgtgaagggagacctgctgattgacatcggctctggccccactatctatcagctcctctctgcttgtgaatcctttaaggagatcgtcgtcactgactactcagaccagaacctgcaggagctggagaagtggctgaagaaagagccagaggcctttgactggtccccagtggtgacctatgtgtgtgatcttgaagggaacagagtcaagggtccagagaaggaggagaagttgagacaggcggtcaagcaggtgctgaagtgtgatgtgactcagagccagccactgggggccgtccccttacccccggctgactgcgtgctcagcacactgtgtctggatgccgcctgcccagacctccccacctactgcagggcgctcaggaacctcggcagcctactgaagccagggggcttcctggtgatcatggatgcgctcaagagcagctactacatgattggtgagcagaagttctccagcctccccctgggccgggaggcagtagaggctgctgtgaaagaggctggctacacaatcgaatggtttgaggtgatctcgcaaagttattcttccaccatggccaacaacgaaggacttttctccctggtggcgaggaagctgagcagacccctgtgatgcctgtgacctcaattaaagcaattcctttgacctgtca

SEQ ID NO: 769 - DNA, 2199 bp, Homo sapiens
gggggtatttcctgaaagatgctaatctatttgccaaacttggtcttgaatgtactgggggcttcaaggtatgggtatatttttcttgtgtccttgcagttagcccccatgtcttatgtgtgtcctgaaaaaataagagcctgcccaagactttgggcctcttgacagaattaaccacttttatacatctgagttctcttggtaagttctttagcagtgttcaaagtctactagctcgcattagtttctgttgctgccaacagatctgaactaatgctaacagatccccctgagggattcttgatgggctgagcagctggctggagctagtactgactgacattcattgtgatgagggcagctttctggtacaggattctaagctctatgttttctatacattttcatctgtacttgcacctcactttacacaagaggaaactatgcaaagttagctggatcgctcaaggtcacttaggtgagttggcaagtccatgcttcccactcagctcctcaggtcagcaagtctacttctctgcctattttgtatactctctttaatatgtgcctagctttggaaagtctagaatgggtccctggtgcctttttactttgaagaaatcagtttctgcctctttttggaaaagaaaacaaagtgcaattgttttttactggaaagttacccaatagcatgaggtgaacaggacgtagttaggccttcctgtaaacagaaaatcatatcaaaacactatcttcccatctgtttctcaatgcctgctacttcttgtagatatttcatttcaggagagcagcagttaaacccgtggattttgtagttaggaacctgggttcaaaccctcttccactaattggctatgtctctggacaagtttttttttttttttttttttaaaccctttctgaactttcactttctatgtctacctcaaagaattgttgtgaggcttgagataatgcatttgtaaagggtctgccagataggaagatgctagttatggatttacaaggttgttaaggctgtaagagtctaaaacctacagtgaatcacaatgcatttacccccactgacttggacataagtgaaaactagccagaagtctctttttcaaattacttacaggttattcaatataaaatttttgtaatggataatcttatttatctaaactaaagcttcctgtttatacacactcctgttattctgggataagataaatgaccacagcaccttaatttctaggtgggtgcctgtgatggttcattgtaggtaaggacattttctctttttcagcagctgtgtaggtccagagcctctgggagaggaggggggtagcatgcacccagcaggggactgaactgggaaactcaaggttctttttactgtggggtagtgagctgcctttctgtgatcggtttccctagggatgttgctgttcccctccttgctattcgcagctacatacaacgtggccaaccccagtaggctgatcctatatatgatcagtgctggtgctgactctcaatagccccacccaagctggctataggtttacagatacattaattaggcaacctaaaatattgatgctggtgttggtgtgacataatgctatggccagaactgaaacttagagttataattcatgtattagggttctccagagggacagaattagtaggatatatgtatatatgaaagggaggttattagggagaactggctcccacagttagaaggcgaagtcgcacaataggccgtctgcaagctgggttagagagaagccagtagtggctcagcctgagttcaaaaacctcaaaactggggaagctgacagtgcagccagccttcagtctgtggccaaaggcccaagagcccctggcaaccaacccactggtgcaagtcctagattccaaaggctgaagatcctggagtctgatgtccaagagcaggaagagtggaagaaagccagaagactcagcaaacaaggtagacagagtctaccaccacagtggccataccaaagaggctaccgattccttcctgctacctggatccctgaagttgccctggtctctgcaccttctaaacctagttcttaagagctttccattacatgagctgtctcaaagccctccaataaattctcagtgtaagcttcaaaaaaaaaaaaaaaaaaa

SEQ ID NO: 770 - protein, 524 aa, Homo sapiens
  misc_feature (523)..(523): Xaa = selenocysteine
MAAMAVALRGLGGRFRWRTQAVAGGVRGAARGAAAGQRDYDLLVVGGGSGGLACAKEAAQLGRKVAVVDYVEPSPQGTRWGLGGTCVNVGCIPKKLMHQAALLGGLIQDAPNYGWEVAQPVPHDWRKMAEAVQNHVKSLNWGHRVQLQDRKVKYFNIKASFVDEHTVCGVAKGGKEILLSADHIIIATGGRPRYPTHIEGALEYGITSDDIFWLKESPGKTLVVGASYVALECAGFLTGIGLDTTIMMRSIPLRGFDQQMSSMVIEHMASHGTRFLRGCAPSRVRRLPDGQLQVTWEDSTTGKEDTGTFDTVLWAIGRVPDTRSLNLEKAGVDTSPDTQKILVDSREATSVPHIYAIGDVVEGRPELTPIAIMAGRLLVQRLFGGSSDLMDYDNVPTTVFTPLEYGCVGLSEEEAVARHGQEHVEVYHAHYKPLEFTVAGRDASQCYVKMVCLREPPQLVLGLHFLGPNAGEVTQGFALGIKCGASYAQVMRTVGIHPTCSEEVVKLRISKRSGLDPTVTGCXG

SEQ ID NO: 771 - DNA, 2180 bp, Homo sapiens
attccccacaccctatcccagtgttccaccctaggtctgaaggcccccgccccgaatccggccgcattcggccccggtctagccagcgctctcacctctcccgcgacggcccgcccgggactggacccgccccggtccggcgcaggcagcgcggcgggcagccctagctgccccagaagccccacgacgatggcggcaatggcggtggcgctgcggggattaggagggcgcttccggtggcggacgcaggccgtggcgggcggggtgcggggcgcggcgcggggcgcagcagcaggtcagcgggactatgatctcctggtggtcggcgggggatctggtggcctggcttgtgccaaggaggccgcccagctgggaaggaaggtggccgtggtggactacgtggaaccttctccccaaggcacccggtggggcctcggcggcacctgcgtcaacgtgggctgcatccccaagaagctgatgcaccaggcggcactgctgggaggcctgatccaagatgcccccaactatggctgggaggtggcccagcccgtgccgcatgactggaggaagatggcagaagctgttcaaaatcacgtgaaatccttgaactggggccaccgtgtccagcttcaggacagaaaagtcaagtactttaacatcaaagccagctttgttgacgagcacacggtttgcggcgttgccaaaggtgggaaagagattctgctgtcagccgatcacatcatcattgctactggagggcggccgagataccccacgcacatcgaaggtgccttggaatatggaatcacaagtgatgacatcttctggctgaaggaatcccctggaaaaacgttggtggtcggggccagctatgtggccctggagtgtgctggcttcctcaccgggattgggctggacaccaccatcatgatgcgcagcatccccctccgcggcttcgaccagcaaatgtcctccatggtcatagagcacatggcatctcatggcacccggttcctgaggggctgtgccccctcgcgggtcaggaggctccctgatggccagctgcaggtcacctgggaggacagcaccaccggcaaggaggacacgggcacctttgacaccgtcctgtgggccataggtcgagtcccagacaccagaagtctgaatttggagaaggctggggtagatactagccccgacactcagaagatcctggtggactcccgggaagccacctctgtgccccacatctacgccattggtgacgtggtggaggggcggcctgagctgacacccatagcgatcatggccgggaggctcctggtgcagcggctcttcggcgggtcctcagatctgatggactacgacaatgttcccacgaccgtcttcaccccgctggagtatggctgtgtggggctgtccgaggaggaggcagtggctcgccacgggcaggagcatgttgaggtctatcacgcccattataaaccactggagttcacggtggctggacgagatgcatcccagtgttatgtaaagatggtgtgcctgagggagcccccacagctggtgctgggcctgcatttccttggccccaacgcaggcgaagttactcaaggatttgctctggggatcaagtgtggggcttcctatgcgcaggtgatgcggaccgtgggtatccatcccacatgctctgaggaggtagtcaagctgcgcatctccaagcgctcaggcctggaccccacggtgacaggctgctgagggtaagcgccatccctgcaggccagggcacacggtgcgcccgccgccagctcctcggaggccagacccaggatggctgcaggccaggtttggggggcctcaaccctctcctggagcgcctgtgagatggtcagcgtggagcgcaagtgctggacaggtggcccgtgtgccccacagggatggctcaggggactgtccacctcacccctgcacctctcagcctctgccgccgggcacccccccccaggctcctggtgccagatgatgacgacctgggtggaaacctaccctgtgggcacccatgtccgagccccctggcatttctgcaatgcaaataaagagggtactttttctgataaaaaaaaaaaaaaaaaaaaaaaaaaaaaaaaaaaaaaaaaaaaaaaaaaaaaaaaaaaaaaaaa

SEQ ID NO: 772 - protein, 250 aa, Homo sapiens
WEALVRGCRGLKALLLRGCTQLEDEALKHIQNYCHELVSLNLQSCSRITDEGVVQICRGCHRLQALCLSGCSNLTDASLTALGLNCPRLQILEAARCSHLTDAGFTLLARNCHELEKMDLEECILITDSTLIQLSIHCPKLQALSLPHCELITDDGILHLSNSTCGHERLRVLELDNCLLITDVALEHLENCRGLERLELYDCQQVTRAGIKRMRAQLPHVKVHAYFAPVTPPTAVAGSGQRLCRCCVIL

SEQ ID NO: 773 - DNA, 1789 bp, Homo sapiens
tgggaggcactggtgcgaggttgtcgaggcctgaaagccctgctcctgaggggctgcacacagttagaagatgaagctctgaaacacattcagaattactgccatgagcttgtgagcctcaacttgcagtcctgctcacgtatcacggatgaaggtgtggtgcagatatgcaggggctgtcaccggctacaggctctctgcctttcgggttgcagcaacctcacagatgcctctcttacagccctgggtttgaactgtccgcgactgcaaattttggaggctgcccgatgctcccatttgactgacgcaggttttacacttttagctcggaattgccacgaattggagaagatggatcttgaagaatgcatcctgataaccgacagcacactcatccagctctccattcactgtcctaaactgcaagccctgagcctgccccactgtgaactcatcacagatgatgggatcctgcacctgagcaacagtacctgtggccatgagaggctgcgggtactggagttggacaactgcctcctcatcactgatgtggccctggaacacctagagaactgccgaggcctggagcgcctcgagctgtacgactgccagcaggttacccgtgcaggcatcaagcggatgcgggctcagctccctcatgtcaaagtccacgcctactttgctcccgtcaccccaccgacagcagtggcaggaagtggacagcgactgtgcaggtgctgtgtcattctctgacagcagctgcctgggcccaaggggtgatgaggcatcctttcctctagaagacctgagtcttcctgaccgactccaccatcacccaatctgttgattctccattgggaaaggcatttacaggtaaaagacttctgtatggattgcagttactctggtgatagttttcacctttattctgctgtgaaacaatcaaatcaaagccttgtgtcagttaacacatgacaagtggtctcaatgcagctaggaccatgccagaaacctggatctcttaagagattggtacctacctaggtacgaaagttctacccttggcatactcagcattcctcaaaaagaccatcagtgttagcacaaactgagcagaaaaaataagctgttgattttctacctgatacttaagccagtggcctactttaattcacaattccattttgattagcaggacttttccactttgaagataaatagcaactttatcaaagtgactgtactgcaaattaattcataatgcctgatagttttatatatagagacttatgtggaaggcatgttaataggtttccatgagacaccaaagaaaagaggactctatactgggtggagcagggtcttcacctttttgtttctgtcaacttgtcatatacacctccagggaccaaaaacaaaagcagctcggagtctgtgttgcctgattggaaagtagaagctctggtgtatgctacagcacataacacatttttactaaaggaaaaaagctaattatgtccatgcctctcgtaaaactggggggaaccttaaagagaaagaactaaggcttaagttatctgtagtataatcaattagaagtaatgaatggatgcatgtaaaatggatgtgattttttttcaagcttattttgaaatcttaaaaatcaggttacaccatagctactcaaaagttttacacacttaaaactcagatcagtaagtgttggtaccttttagactcataaaattgaataaaccattgcaatgctttaaaaaaaaaaaaaaaaaaa

SEQ ID NO: 774 - protein, 427 aa, Homo sapiens
MRHLGAFLFLLGVLGALTEMCEIPEMDSHLVEKLGQHLLPWMDRLSLEHLNPSIYVGLRLSSLQAGTKEDLYLHSLKLGYQQCLLGSAFSEDDGDCQGKPSMGQLALYLLALRANCEFVRGHKGDRLVSQLKWFLEDEKRAIGHDHKGHPHTSYYQYGLGILALCLHQKRVHDSVVDKLLYAVEPFHQGHHSVDTAAMAGLAFTCLKRSNFNPGRRQRITMAIRTVREEILKAQTPEGHFGNVYSTPLALQFLMTSPMRGAELGTACLKARVALLASLQDGAFQNALMISQLLPVLNHKTYIDLIFPDCLAPRVMLEPAAETIPQTQEIISVTLQVLSLLPPYRQSISVLAGSTVEDVLKKAHELGGFTYETQASLSGPYLTSVMGKAAGEREFWQLLRDPNTPLLQGIADYRPKDGETIELRLVSW

SEQ ID NO: 775 - DNA, 1987 bp, Homo sapiens
gcagacttagccgtgcattgcaggcatggaggattaatcagtgacaggaagctgcgtctctcggagcggtgaccagctgtggtcaggagagcctcagcagggccagccccaggagtctttcccgattcttgctcactgctcacccacctgctgctgccatgaggcaccttggggccttcctcttccttctgggggtcctgggggccctcactgagatgtgtgaaataccagagatggacagccatctggtagagaagttgggccagcacctcttaccttggatggaccggctttccctggagcacttgaaccccagcatctatgtgggcctacgcctctccagtctgcaggctgggaccaaggaagacctctacctgcacagcctcaagcttggttaccagcagtgcctcctagggtctgccttcagcgaggatgacggtgactgccagggcaagccttccatgggccagctggccctctacctgctcgctctcagagccaactgtgagtttgtcaggggccacaagggggacaggctggtctcacagctcaaatggttcctggaggatgagaagagagccattgggcatgatcacaagggccacccccacactagctactaccagtatggcctgggcattctggccctgtgtctccaccagaagcgggtccatgacagcgtggtggacaaacttctgtatgctgtggaacctttccaccagggccaccattctgtggacacagcagccatggcaggcttggcattcacctgtctgaagcgctcaaacttcaaccctggtcggagacaacggatcaccatggccatcagaacagtgcgagaggagatcttgaaggcccagacccccgagggccactttgggaatgtctacagcaccccattggcattacagttcctcatgacttcccccatgcgtggggcagaactgggaacagcatgtctcaaggcgagggttgctttgctggccagtctgcaggatggagccttccagaatgctctcatgatttcccagctgctgcccgttctgaaccacaagacctacattgatctgatcttcccagactgtctggcaccacgagtcatgttggaaccagctgctgagaccattcctcagacccaagagatcatcagtgtcacgctgcaggtgcttagtctcttgccgccgtacagacagtccatctctgttctggccgggtccaccgtggaagatgtcctgaagaaggcccatgagttaggaggattcacatatgaaacacaggcctccttgtcaggcccctacttaacctccgtgatggggaaagcggccggagaaagggagttctggcagcttctccgagaccccaacaccccactgttgcaaggtattgctgactacagacccaaggatggagaaaccattgagctgaggctggttagctggtagcccctgagctccctcatcccagcagcctcgcacactccctaggcttctaccctccctcctgatgtccctggaacaggaactcgcctgaccctgctgccacctcctgtgcactttgagcaatgccccctgggatcaccccagccacaagcccttcgagggccctataccatggcccaccttggagcagagagccaagcatcttccctgggaagtctttctggccaagtctggccagcctggccctgcaggtctcccatgaaggccaccccatggtctgatgggcatgaagcatctcagactccttggcaaaaaacggagtccgcaggccgcaggtgttgtgaagaccactcgttctgtggttggggtcctgcaagaaggcctcctcagcccgggggctatggccctgaccccagctctccactctgctgttagagtggcagctccgagctggttgtggcacagtagctggggagacctcagcagggctgctcagtgcctgcctctgacaaaattaaagcattgatggcctgtggacctgcaaaaaa

SEQ ID NO: 776 - protein, 517 aa, Homo sapiens
MLRAAARFGPRLGRRLLSAAATQAVPAPNQQPEVFCNQIFINNEWHDAVSRKTFPTVNPSTGEVICQVAEGDKEDVDKAVKAARAAFQLGSPWRRMDASHRGRLLNRLADLIERDRTYLAALETLDNGKPYVISYLVDLDMVLKCLRYYAGWADKYHGKTIPIDGDFFSYTRHEPVGVCGQIIPWNFPLLMQAWKLGPALATGNVVVMKVAEQTPLTALYVANLIKEAGFPPGVVNIVPGFGPTAGAAIASHEDVDKVAFTGSTEIGRVIQVAAGSSNLKRVTLELGGKSPNIIMSDADMDWAVEQAHFALFFNQGQCCCAGSRTFVQEDIYDEFVERSVARAKSRVVGNPFDSKTEQGPQVDETQFKKILGYINTGKQEGAKLLCGGGIAADRGYFIQPTVFGDVQDGMTIAKEEIFGPVMQILKFKTIEEVVGRANNSTYGLAAAVFTKDLDKANYLSQALQAGTVWVNCYDVFGAQSPFGGYKMSGSGRELGEYGLQAYTEVKTVTVKVPQKNS

SEQ ID NO: 777 - DNA, 2445 bp, Homo sapiens
acctcgttcatctccttcacctccgaaatgatctcgcttttgggtttacggccggtctcttcacctggagcatcagccgggaaggtcagggtcgccctggctcgggcctgttcacattggggtcaaaggcacacattgggggctcaaccaaggcgagctgcgttcgcggggccgggtctttccgcacaggcggagggcggtggcgggcgcggaggcgtcgcgcgagccagggggcagccacgggccgggggtacctagcgccacccgcttcgcttgcatcagctgcgcgccccatcccgaggaatggtagaggcagccccgcccccggcccgcccccgcctttccattggctgccgcgcggggcggggagcggggtcggctcagtggccctgagaccctagctctgctctcggtccgctcgctgtccgctagcccgctgcgatgttgcgcgctgccgcccgcttcgggccccgcctgggccgccgcctcttgtcagccgccgccacccaggccgtgcctgcccccaaccagcagcccgaggtcttctgcaaccagattttcataaacaatgaatggcacgatgccgtcagcaggaaaacattccccaccgtcaatccgtccactggagaggtcatctgtcaggtagctgaaggggacaaggaagatgtggacaaggcagtgaaggccgcccgggccgccttccagctgggctcaccttggcgccgcatggacgcatcacacaggggccggctgctgaaccgcctggccgatctgatcgagcgggaccggacctacctggcggccttggagaccctggacaatggcaagccctatgtcatctcctacctggtggatttggacatggtcctcaaatgtctccggtattatgccggctgggctgataagtaccacgggaaaaccatccccattgacggagacttcttcagctacacacgccatgaacctgtgggggtgtgcgggcagatcattccgtggaatttcccgctcctgatgcaagcatggaagctgggcccagccttggcaactggaaacgtggttgtgatgaaggtagctgagcagacacccctcaccgccctctatgtggccaacctgatcaaggaggctggctttccccctggtgtggtcaacattgtgcctggatttggccccacggctggggccgccattgcctcccatgaggatgtggacaaagtggcattcacaggctccactgagattggccgcgtaatccaggttgctgctgggagcagcaacctcaagagagtgaccttggagctgggggggaagagccccaacatcatcatgtcagatgccgatatggattgggccgtggaacaggcccacttcgccctgttcttcaaccagggccagtgctgctgtgccggctcccggaccttcgtgcaggaggacatctatgatgagtttgtggagcggagcgttgcccgggccaagtctcgggtggtcgggaacccctttgatagcaagaccgagcaggggccgcaggtggatgaaactcagtttaagaagatcctcggctacatcaacacggggaagcaagagggggcgaagctgctgtgtggtgggggcattgctgctgaccgtggttacttcatccagcccactgtgtttggagatgtgcaggatggcatgaccatcgccaaggaggagatcttcgggccagtgatgcagatcctgaagttcaagaccatagaggaggttgttgggagagccaacaattccacgtacgggctggccgcagctgtcttcacaaaggatttggacaaggccaattacctgtcccaggccctccaggcgggcactgtgtgggtcaactgctatgatgtgtttggagcccagtcaccctttggtggctacaagatgtcggggagtggccgggagttgggcgagtacgggctgcaggcatacactgaagtgaaaactgtcacagtcaaagtgcctcagaagaactcataagaatcatgcaagcttcctccctcagccattgatggaaagttcagcaagatcagcaacaaaaccaagaaaaatgatccttgcgtgctgaatatctgaaaagagaaatttttcctacaaaatctcttgggtcaagaaagttctagaatttgaattgataaacatggtgggttggctgagggtaagagtatatgaggaaccttttaaacgacaacaatactgctagctttcaggatgatttttaaaaaatagattcaaatgtgttatcctctctctgaaacgcttcctataactcgagtttataggggaagaaaaagctattgtttacaattatatcaccattaaggcaactgctacaccctgctttgtattctgggctaagattcattaaaaactagctgctcttaaaaaaaaaaaaaaaaaaaaaaaaaaaaaaaaaaaaaaaaaaaaaaa

SEQ ID NO: 778 - protein, 346 aa, Homo sapiens
MEESDSEKTTEKENLGPRMDPPLGEPEGSLGWVLPNTAMKKKVLLMGKSGSGKTSMRSIIFANYIARDTRRLGATIDVEHSHVRFLGNLVLNLWDCGGQDTFMENYFTSQRDNIFRNVEVLIYVFDVESRELEKDMHYYQSCLEAILQNSPDAKIFCLVHKMDLVQEDQRDLIFKEREEDLRRLSRPLECSCFRTSIWDETLYKAWSSIVYQLIPNVQQLEMNLRNFAEIIEADEVLLFERATFLVISHYQCKEQRDAHRFEKISNIIKQFKLSCSKLAASFQSMEVRNSNFAAFIDIFTSNTYVMVVVSDPSIPSAATLINIRNARKHFEKLERVDGPKQCLLMR

SEQ ID NO: 779 - DNA, 1495 bp, Homo sapiens
cagctgaggcgttctccgcttagtgcctacggcatgggtcagctctttctgccacctccgccttcgcggtcctcacctctttgcgggtgaagttaccttttgggtttccagaccttgggggcctgaggcaaactcggggacgaacccctaacccacctctcttttctgtcattctccaactcttactttgtaccacggaatcacttggccttaaagctagccagctcggccgtgccttgaggccaggttcgagagataaaggtaaccgtggggaaagcggccccccagtggacaaaggcggaggcaagaatagagcaggcctgagggccataggcgatgagaataggcagttgaggggtgaaaaagaaaacaaacaaacaacaacaacaaaccctgaagagtactgaagatttagaagggactggaaaggacttgttgcgcaatggaagaatctgactctgagaaaacgacggagaaagaaaatctggggccgagaatggatccaccactaggggaaccggaaggatcgcttgggtgggtgctaccaaatacagccatgaagaaaaaggtgctgttgatgggtaaaagtgggtctggtaagaccagcatgaggtctattatctttgcaaattatattgccagagacacacgtcgccttggcgcaacaattgatgtagaacattctcatgttcgatttctgggaaacctggtattgaacctgtgggattgtggtgggcaagacaccttcatggaaaattatttcactagccaacgggacaacatcttccgaaatgtggaggttctgatttatgtctttgatgtggagagccgcgaactggaaaaggacatgcactattaccaatcatgcctggaggccattctgcagaattctccagatgccaaaatattttgcttggtacacaaaatggatctggtacaggaggatcaacgggacctgatttttaaagagcgagaagaagatttgaggcgtttgtctcgcccattggaatgttcttgtttccgaacatctatctgggatgaaaccctctataaggcttggtccagcatagtttatcagctgattcccaatgttcagcagctggaaatgaacctaaggaattttgctgaaattatcgaagctgatgaagtacttctttttgagagagctacttttctggtaatttctcactatcagtgtaaagagcagcgtgatgcccatagatttgagaaaataagcaacattattaagcagttcaagctgagctgcagcaagctggctgcctctttccagagtatggaagtcaggaactctaacttcgctgctttcattgacatctttacatccaacacttatgtgatggttgtagtgtctgatccgtccattccttctgcagctactctgatcaacatccgcaatgccaggaaacactttgaaaagctggaaagagtggatggaccaaagcagtgtcttctcatgcgctaaacattagtagta

SEQ ID NO: 780 - protein, 1722 aa, Homo sapiens
MRTGWATPRRPAGLLMLLFWFFDLAEPSGRAANDPFTIVHGNTGKCIKPVYGWIVADDCDETEDKLWKWVSQHRLFHLHSQKCLGLDITKSVNELRMFSCDSSAMLWWKCEHHSLYGAARYRLALKDGHGTAISNASDVWKKGGSEESLCDQPYHEIYTRDGNSYGRPCEFPFLIDGTWHHDCILDEDHSGPWCATTLNYEYDRKWGICLKPENGCEDNWEKNEQFGSCYQFNTQTALSWKEAYVSCQNQGADLLSINSAAELTYLKEKEGIAKIFWIGLNQLYSARGWEWSDHKPLNFLNWDPDRPSAPTIGGSSCARMDAESGLWQSFSCEAQLPYVCRKPLNNTVELTDVWTYSDTRCDAGWLPNNGFCYLLVNESNSWDKAHAKCKAFSSDLISIHSLADVEVVVTKLHNEDIKEEVWIGLKNINIPTLFQWSDGTEVTLTYWDENEPNVPYNKTPNCVSYLGELGQWKVQSCEEKLKYVCKRKGEKLNDASSDKMCPPDEGWKRHGETCYKIYEDEVPFGTNCNLTITSRFEQEYLNDLMKKYDKSLRKYFWTGLRDVDSCGEYNWATVGGRRRAVTFSNWNFLEPASPGGCVAMSTGKSVGKWEVKDCRSFKALSICKKMSGPLGPEEASPKPDDPCPEGWQSFPASLSCYKVFHAERIVRKRNWEEAERFCQALGAHLSSFSHVDEIKEFLHFLTDQFSGQHWLWIGLNKRSPDLQGSWQWSDRTPVSTIIMPNEFQQDYDIRDCAAVKVFHRPWRRGWHFYDDREFIYLRPFACDTKLEWVCQIPKGRTPKTPDWYNPDRAGIHGPPLIIEGSEYWFVADLHLNYEEAVLYCASNHSFLATITSFVGLKAIKNKIANISGDGQKWWIRISEWPIDDHFTYSRYPWHRFPVTFGEECLYMSAKTWLIDLGKPTDCSTKLPFICEKYNVSSLEKYSPDSAAKVQCSEQWIPFQNKCFLKIKPVSLTFSQASDTCHSYGGTLPSVLSQIEQDFITSLLPDMEATLWIGLRWTAYEKINKWTDNRELTYSNFHPLLVSGRLRIPENFFEEESRYHCALILNLQKSPFTGTWNFTSCSERHFVSLCQKYSEVKSRQTLQNASETVKYLNNLYKIIPKTLTWHSAKRECLKSNMQLVSITDPYQQAFLSVQALLHNSSLWIGLFSQDDELNFGWSDGKRLHFSRWAETNGQLEDCVVLDTDGFWKTVDCNDNQPGAICYYSGNETEKEVKPVDSVKCPSPVLNTPWIPFQNCCYNFIITKNRHMATTQDEVHTKCQKLNPKSHILSIRDEKENNFVLEQLLYFNYMASWVMLGITYRNNSLMWFDKTPLSYTHWRAGRPTIKNEKFLAGLSTDGFWDIQTFKVIEEAVYFHQHSILACKIEMVDYKEEHNTTLPQFMPYEDGIYSVIQKKVTWYEALNMCSQSGGHLASVHNQNGQLFLEDIVKRDGFPLWVGLSSHDGSESSFEWSDGSTFDYIPWKGQTSPGNCVLLDPKGTWKHEKCNSVKDGAICYKPTKSKKLSRLTYSSRCPAAKENGSRWIQYKGHCYKSDQALHSFSEAKKLCSKHDHSATIVSIKDEDENKFVSRLMRENNNITMRVWLGLSQHSVDQSWSWLDGSEVTFVKWENKSKSGVGRCSMLIASNETWKKVECEHGFGRVVCKVPLGPDYTAIAIIVATLSILVLMGGLIWFLFQRHRLHLAGFSSVRYAQGVNEDEIMLPSFHD

SEQ ID NO: 781 - DNA, 6928 bp, Homo sapiens
ggcgggagcgcgtgcgcccgaggacccggccggaaggcttgcgccagctcaggatgaggacaggctgggcgacccctcgccgcccggcggggctcctcatgctgctcttctggttcttcgatctcgcggagccctctggccgcgcagctaatgaccccttcaccatcgtccatggaaatacgggcaagtgcatcaagccagtgtatggctggatagtagcagacgactgtgatgaaactgaggacaagttatggaagtgggtgtcccagcatcggctctttcatttgcactcccaaaagtgccttggcctcgatattaccaaatcggtaaatgagctgagaatgttcagctgtgactccagtgccatgctgtggtggaaatgtgagcaccactctctgtacggagctgcccggtaccggctggctctgaaggatggacatggcacagcaatctcaaatgcatctgatgtctggaagaaaggaggctcagaggaaagcctttgtgaccagccttatcatgagatctataccagagatgggaactcttatgggagaccttgtgaatttccattcttaattgatgggacctggcatcatgattgcattcttgatgaagatcatagtgggccatggtgtgccaccaccttaaattatgaatatgaccgaaagtggggcatctgcttaaagcctgaaaacggttgtgaagataattgggaaaagaacgagcagtttggaagttgctaccaatttaatactcagacggctctttcttggaaagaagcttatgtttcatgtcagaatcaaggagctgatttactgagcatcaacagtgctgctgaattaacttaccttaaagaaaaagaaggcattgctaagattttctggattggtttaaatcagctatactctgctagaggctgggaatggtcagaccacaaaccattaaactttctcaactgggatccagacaggcccagtgcacctactataggtggctccagctgtgcaagaatggatgctgagtctggtctgtggcagagcttttcctgtgaagctcaactgccctatgtctgcaggaaaccattaaataatacagtggagttaacagatgtctggacatactcagatacccgctgtgatgcaggctggctgccaaataatggattttgctatctgctggtaaatgaaagtaattcctgggataaggcacatgcgaaatgcaaagccttcagtagtgacctaatcagcattcattctctagcagatgtggaggtggttgtcacaaaactccataatgaggatatcaaagaagaagtgtggataggccttaagaacataaacataccaactttatttcagtggtcagatggtactgaagttactctaacatattgggatgagaatgagccaaatgttccctacaataagacgcccaactgtgtttcctacttaggagagctaggtcagtggaaagtccaatcatgtgaggagaaactaaaatatgtatgcaagagaaagggagaaaaactgaatgacgcaagttctgataagatgtgtcctccagatgagggctggaagagacatggagaaacctgttacaagatttatgaggatgaggtcccttttggaacaaactgcaatctgactatcactagcagatttgagcaagaatacctaaatgatttgatgaaaaagtatgataaatctctaagaaaatacttctggactggcctgagagatgtagattcttgtggagagtataactgggcaactgttggtggaagaaggcgggctgtaaccttttccaactggaattttcttgagccagcttccccgggcggctgcgtggctatgtctactggaaagtctgttggaaagtgggaggtgaaggactgcagaagcttcaaagcactttcaatttgcaagaaaatgagtggaccccttgggcctgaagaagcatcccctaagcctgatgacccctgtcctgaaggctggcagagtttccccgcaagtctttcttgttataaggtattccatgcagaaagaattgtaagaaagaggaactgggaagaagctgaacgattctgccaagcccttggagcacacctttctagcttcagccatgtggatgaaataaaggaatttcttcactttttaacggaccagttcagtggccagcattggctgtggattggtttgaataaaaggagcccagatttacaaggatcctggcaatggagtgatcgtacaccagtgtctactattatcatgccaaatgagtttcagcaggattatgacatcagagactgtgctgctgtcaaggtatttcataggccatggcgaagaggctggcatttctatgatgatagagaatttatttatttgaggccttttgcttgtgatacaaaacttgaatgggtgtgccaaattccaaaaggccgtactccaaaaacaccagactggtacaatccagaccgtgctggaattcatggacctccacttataattgaaggaagtgaatattggtttgttgctgatcttcacctaaactatgaagaagccgtcctgtactgtgccagcaatcacagctttcttgcgactataacatcttttgtgggactaaaagccatcaaaaacaaaatagcaaatatatctggtgatggacagaagtggtggataagaattagcgagtggccaatagatgatcattttacatactcacgatatccatggcaccgctttcctgtgacatttggagaggaatgcttgtacatgtctgccaagacttggcttatcgacttaggtaaaccaacagactgtagtaccaagttgcccttcatctgtgaaaaatataatgtttcttcgttagagaaatacagcccagattctgcagctaaagtgcaatgttctgagcaatggattccttttcagaataagtgttttctaaagatcaaacccgtgtctctcacattttctcaagcaagcgatacctgtcactcctatggtggcacccttccttcagtgttgagccagattgaacaagactttattacatccttgcttccggatatggaagctactttatggattggtttgcgctggactgcctatgaaaagataaacaaatggacagataacagagagctgacgtacagtaactttcacccattattggttagtgggaggctgagaataccagaaaatttttttgaggaagagtctcgctaccactgtgccctaatactcaacctccaaaaatcaccgtttactgggacgtggaattttacatcctgcagtgaacgccactttgtgtctctctgtcagaaatattcagaagttaaaagcagacagacgttgcagaatgcttcagaaactgtaaagtatctaaataatctgtacaaaataatcccaaagactctgacttggcacagtgctaaaagggagtgtctgaaaagtaacatgcagctggtgagcatcacggacccttaccagcaggcattcctcagtgtgcaggcgctccttcacaactcttccttatggatcggactcttcagtcaagatgatgaactcaactttggttggtcagatgggaaacgtcttcattttagtcgctgggctgaaactaatgggcaactcgaagactgtgtagtattagacactgatggattctggaaaacagttgattgcaatgacaatcaaccaggtgctatttgctactattcaggaaatgagactgaaaaagaggtcaaaccagttgacagtgttaaatgtccatctcctgttctaaatactccgtggataccatttcagaactgttgctacaatttcataataacaaagaataggcatatggcaacaacacaggatgaagttcatactaaatgccagaaactgaatccaaaatcacatattctgagtattcgagatgaaaaggagaataactttgttcttgagcaactgctgtacttcaattatatggcttcatgggtcatgttaggaataacttatagaaataattctcttatgtggtttgataagaccccactgtcatatacacattggagagcaggaagaccaactataaaaaatgagaagtttttggctggtttaagtactgacggcttctgggatattcaaacctttaaagttattgaagaagcagtttattttcaccagcacagcattcttgcttgtaaaattgaaatggttgactacaaagaagaacataatactacactgccacagtttatgccatatgaagatggtatttacagtgttattcaaaaaaaggtaacatggtatgaagcattaaacatgtgttctcaaagtggaggtcacttggcaagcgttcacaaccaaaatggccagctctttctggaagatattgtaaaacgtgatggatttccactatgggttgggctctcaagtcatgatggaagtgaatcaagttttgaatggtctgatggtagtacatttgactatatcccatggaaaggccaaacatctcctggaaattgtgttctcttggatccaaaaggaacttggaaacatgaaaaatgcaactctgttaaggatggtgctatttgttataaacctacaaaatctaaaaagctgtcccgtcttacatattcatcaagatgtccagcagcaaaagagaatgggtcacggtggatccagtacaagggtcactgttacaagtctgatcaggcattgcacagtttttcagaggccaaaaaattgtgttcaaaacatgatcactctgcaactatcgtttccataaaagatgaagatgagaataaatttgtgagcagactgatgagggaaaataataacattaccatgagagtttggcttggattatctcaacattctgttgaccagtcttggagttggttagatggatcagaagtgacatttgtcaaatgggaaaataaaagtaagagtggtgttggaagatgtagcatgttgatagcttcaaatgaaacttggaaaaaagttgaatgtgaacatggttttggaagagttgtctgcaaagtgcctctgggccctgattacacagcaatagctatcatagttgccacactaagtatcttagttctcatgggcggactgatttggttcctcttccaaaggcaccgtttgcacctggcgggtttctcatcagttcgatatgcacaaggagtgaatgaagatgagattatgcttccttctttccatgactaaattcttctaaaagttttctaatttgcactaatgtggttatggagaaattagtcacttaaaatgtcccagtgtcagtatttactctgctccaaagtagaactcttaaatactttttcagttgtttagatcttaggcatgtgctggtatccacagttaattccctgctaaatgccatgtttatcaccctaattaatagaatggaggggactccaaagctggaactgaagtccaaattgtttgtacagtaatatgtttaatgttcattttctctgtatgaatgtgattggtaactaggatatgtatattttaatagaatttttaacaaaacttcttagaaaattaaaataggcatattactaggtgacatgtctactttttaatttttaagagcatccggccaaatgcaaaattagtacctcaaagtaaaaattgaactgtaaactctatcagcattgtttcaaaatagtcatttttagcactggggaaaaataaacaataagacatgcttactttttaatttttatttttttgagactgagtctctctctgttgcccaggctggagtacaatggcgtgatctcggctcactgcaaatctccgcctcccaggttcaagcgattctcctgcctcagcctcctgagtagctgggattacaggcaactgccaccatgcccggctaatttttgtatttttagtagagatggggtttcaccatgttggccaggctggtctcgaactcgtgaccgcagtgatcctcccgcctcggcctcccaaagtgctgggattacaggcatgagccaccgcgcctggcctctgcttactttttatatagcaaaatgattccccttggcaagatgtttcttatattattccaaagttatttcataccattattatgtaaatatgaagagtttttttctgtttataattgtttataaaacaatgacttttaaagatttagtgcttaacattttcccaagtgtgggaacattatttttagattgagtaggtaccttgtagcagtgtgctttgcattttctgatgtattacatgactgtttcttttgtaaagagaatcaactaggtatttaagactgataattttacaatttatatgcttcacatagcatgtcaacttttgactaagaattttgttttacttttttaacatgtgttaaacagagaaagggtccatgaaggaaagtgtatgagttgcatttgtaaaaatgagactttttcagtggaactctaaaccttgtgatgactactaacaaatgtaaaattatgagtgattaagaaaacattgctttgtggttatcactttaagttttgacacctagattatagtcttagtaatagcatccactggaaaaggtgaaaatgttttattcagcatttaacttacatttgtactttagagtatttttgtataaaatccatagatttattttacatttagagtatttacactatgataaagttgtaaataattttctaagacagtttttatatagtctacagttgtcctgatttcttattgaatttgttagactagttctcttgtcttgtgatctgtgtacaattttagtcactaagactttcctccaagaactaagccaacttgatgtgaaaagcacggctgtatataatggtgatgtcataataaagttgttttatcttttaagtaaaaaaaaaaaaaaaaaaaaa

SEQ ID NO: 782 - protein, 193 aa, Homo sapiens
MQSLMQAPLLIALGLLLATPAQAHLKKPSQLSSFSWDNCDEGKDPAVIRSLTLEPDPIVVPGNVTLSVVGSTSVPLSSPLKVDLVLEKEVAGLWIKIPCTDYIGSCTFEHFCDVLDMLIPTGEPCPEPLRTYGLPCHCPFKEGTYSLPKSEFVVPDLELPSWLTTGNYRIESVLSSSGKRLGCIKIAASLKGI

SEQ ID NO: 783 - DNA, 2436 bp, Homo sapiens
aaggcacctctgccgccacagaccttgcagttaactccgccctgacccacccttcccgatgcagtccctgatgcaggctcccctcctgatcgccctgggcttgcttctcgcgacccctgcgcaagcccacctgaaaaagccatcccagctcagtagcttttcctgggataactgtgatgaagggaaggaccctgcggtgatcagaagcctgactctggagcctgaccccatcgtcgttcctggaaatgtgaccctcagtgtcgtgggcagcaccagtgtccccctgagttctcctctgaaggtggatttagttttggagaaggaggtggctggcctctggatcaagatcccatgcacagactacattggcagctgtacctttgaacacttctgtgatgtgcttgacatgttaattcctactggggagccctgcccagagcccctgcgtacctatgggcttccttgccactgtcccttcaaagaaggaacctactcactgcccaagagcgaattcgttgtgcctgacctggagctgcccagttggctcaccaccgggaactaccgcatagagagcgtcctgagcagcagtgggaagcgtctgggctgcatcaagatcgctgcctctctaaagggcatataacatggcatctgccacagcagaatggagcggtgtgaggaaggtcccttttcctctgttttgtgtttgccaaggccaaactcccactctctgcccccctttaatcccctttctacagtgagtccactaccctcactgaaaatcattttgtaccacttacattttaggctggggcaagcagccctgacctaagggagaatgagttggacagttcttgatagcccagggcatctgctgggctgaccacgttactcatccccgttaacattctctctaaagagcctcgttcatttccaaagcagttaaggaatgggaaccagagtgttttaggacctgaagaatctttatgactctctctctttcactcttttttttttttgtcactaagttaaaagcgaagtgagagtattaacgtttttgttctcctccggccccctgttacaatgaaggggcaaaagtatttgctcttagtctattcctcccttaacttctgtgactaatttttatttcctttctagatttgcccaattaatactagggtgcagtgtatcctggagaggtagggtgtgtgggggaggaatcccttgggggagatattaggagtgctctgttgtttacaaactcacggtacccgcagggcctagcaagagacttaaatgactgataagaaccgtgagaaacatgttgcttccaggcttgatttcgatttttcgctttttttttttttgagacagaatctcactttgtcaccaggctggagtgcagtggtgcaatctcacctcactgcaacctccgcctcctgggttcaagcaattctcctgcctcagcctcccaagtagcttggactacaggccctgccaccacgcccggctaatttgtgtatttttagtagagatggggtttcaccatgttggccaggatggtctcgatctcttgacctcgtgatctgtccaccttggccttgcaaagcgctggattacaggcatgagccactacacccagccgatttttcctttttgattaaagatgctattacaatgtaaatatttcttacacagaaagtcacagcacatgtgcccattgatacaaggctgctgaggcctggtctccagttggaaatataattaagggtggcaaggactggagtcagttggagagtgcatagccagtctgtgaagacaactgccagatactggcaatactccagcctggtgacagagtgagactctgtctcaaaaaaaaagtttcaatgtttactcctagagaagccaaaaatccagatttgtatatgaaatcttaccattttaaaagattggcagctaattatttttttaaaaagctgtgcagtgtgatgtgtcccaaacggactggctcatgggtggccacgtcacaacctctgatctcagaccgtgcatgccttgtcctcttaagacaactcctgtggcaccgtttctccctccacagggccaaagccatagtgtccggtcccaaggacaaggctcttccagtgctaggagaggtatgagcagcctctcacctgtgagctgtggggatcacaaggctgcctgcctcagtcttggagtcctgttgggtgaatgaggcagatgggaaagagcctcaccagcagctgcttttggagcaggggtccaaggaagagagggtggcctcgacatcaaactgcctggatttttctaccaccctgttacatcataacaacttctgaaacacacaccagccctgagttctgggctcatttgaagcctggaatagcaataaatctttttaacttgcggacagtt

SEQ ID NO: 784 - protein, 2671 aa, Homo sapiens
MSEMSSFLHIGDIVSLYAEGSVNGFISTLGLVDDRCVVEPAAGDLDNPPKKFRDCLFKVCPMNRYSAQKQYWKAKQTKQDKEKIADVVLLQKLQHAAQMEQKQNDTENKKVHGDVVKYGSVIQLLHMKSNKYLTVNKRLPALLEKNAMRVTLDATGNEGSWLFIQPFWKLRSNGDNVVVGDKVILNPVNAGQPLHASNYELSDNAGCKEVNSVNCNTSWKINLFMQFRDHLEEVLKGGDVVRLFHAEQEKFLTCDEYKGKLQVFLRTTLRQSATSATSSNALWEVEVVHHDPCRGGAGHWNGLYRFKHLATGNYLAAEENPSYKGDASDPKAAGMGAQGRTGRRNAGEKIKYCLVAVPHGNDIASLFELDPTTLQKTDSFVPRNSYVRLRHLCTNTWIQSTNVPIDIEEERPIRLMLGTCPTKEDKEAFAIVSVPVSEIRDLDFANDASSMLASAVEKLNEGFISQNDRRFVIQLLEDLVFFVSDVPNNGQNVLDIMVTKPNRERQKLMREQNILKQVFGILKVPFREKGGEGPLVRLEELSDQKNAPYQHMFRLCYRVLRYSQEDYRKNQEHIAKQFGMMQSQIGYDILAEDTITALLHNNRKLLEKHITKTEVETFVSLVRKNREPRFLDYLSDLCVSNHIAIPVTQELICKCVLDPKNSDILIRTELRPVKEMAQSHEYLSIEYSEEEVWLTWTDKNNEHHEKSVRQLAQEARAGNAHDENVLSYYRYQLKLFARMCLDRQYLAIDEISQQLGVDLIFLCMADEMLPFDLRASFCHLMLHVHVDRDPQELVTPVKFARLWTEIPTAITIKDYDSNLNASRDDKKNKFANTMEFVEDYLNNVVSEAVPFANEEKNKLTFEVVSLAHNLIYFGFYSFSELLRLTRTLLGIIDCVQGPPAMLQAYEDPGGKNVRRSIQGVGHMMSTMVLSRKQSVFSAPSLSAGASAAEPLDRSKFEENEDIVVMETKLKILEILQFILNVRLDYRISYLLSVFKKEFVEVFPMQDSGADGTAPAFDSTTANMNLDRIGEQAEAMFGVGKTSSMLEVDDEGGRMFLRVLIHLTMHDYAPLVSGALQLLFKHFSQRQEAMHTFKQVQLLISAQDVENYKVIKSELDRLRTMVEKSELWVDKKGSGKGEEVEAGTAKDKKERPTDEEGFLHPPGEKSSENYQIVKGILERLNKMCGVGEQMRKKQQRLLKNMDAHKVMLDLLQIPYDKGDAKMMEILRYTHQFLQKFCAGNPGNQALLHKHLHLFLTPGLLEAETMQHIFLNNYQLCSEISEPVLQHFVHLLATHGRHVQYLDFLHTVIKAEGKYVKKCQDMIMTELTNAGDDVVVFYNDKASLAHLLDMMKAARDGVEDHSPLMYHISLVDLLAACAEGKNVYTEIKCTSLVPLEDVVSVVTHEDCITEVKMAYVNFVNHCYVDTEVEMKEIYTSNHIWTLFENFTLDMARVCSKREKRVADPTLEKYVLSVVLDTINAFFSSPFSENSTSLQTHQPVVVQLLQSTTRLLECPWLQQQHKGSVEACIRTLAMVAKGRAILLPMDLDAHISSMLSSGASCAAAAQRNASSYKATTRAFPRVTPTANQWDYKNIIEKLQDIITALEERLKPLVQAELSVLVDVLHWPELLFLEGSEAYQRCESGGFLSKLIQHTKDLMESEEKLCIKVLRTLQQMLVKKTKYGDRGNQLRKMLLQNYLQNRKSTSRGDLPDPIGTGLDPDWSAIAATQCRLDKEGATKLVCDLITSTKNEKIFQESIGLAIHLLDGGNTEIQKSFHNLMMSDKKSERFFKVLHDRMKRAQQETKSTVAVNMNDLGSQPHEDREPVDPTTKGRVASFSIPGSSSRYSLGPSLRRGHEVSERVQSSEMGTSVLIMQPILRFLQLLCENHNRDLQNFLRCQNNKTNYNLVCETLQFLDIMCGSTTGGLGLLGLYINEDNVGLVIQTLETLTEYCQGPCHENQTCIVTHESNGIDIITALILNDISPLCKYRMDLVLQLKDNASKLLLALMESRHDSENAERILISLRPQELVDVIKKAYLQEEERENSEVSPREVGHNIYILALQLSRHNKQLQHLLKPVKRIQEEEAEGISSMLSLNNKQLSQMLKSSAPAQEEEEDPLAYYENHTSQIEIVRQDRSMEQIVFPVPGICQFLTEETKHRLFTTTEQDEQGSKVSDFFDQSSFLHNEMEWQRNVRSMPLIYWFSRRMTLWGSISFNLAVFINIIIAFFYPYMEGASTGVLDSPLISLLFWILICFSIAALFTKRYSIRPLIVALILRSIYYLGIGPTLNILGALNLTNKIVFVVSFVGNRGTFIRGYKAMVMDMEFLYHVGYILTSVLGLFAHELFYSILLFDLIYREETLFNVIKSVTRNGRSILLTALLALILVYLFSIVGFLFLKDDFILEVDRLPNNHSTASPLGMPHGAAAFVDTCSGDKMDCVSGLSVPEVLEEDRELDSTERACDTLLMCIVTVMNHGLRNGGGVGDILRKPSKDESLFPARVVYDLLFFFIVIIIVLNLIFGVIIDTFADLRSEKQKKEEILKTTCFICGLERDKFDNKTVSFEEHIKLEHNMWNYLYFIVLVRVKNKTDYTGPESYVAQMIKNKNLDWFPRMRAMSLVSNEGEGEQNEIRILQDKLNSTMKLVSHLTAQLNELKEQMTEQRKRRQRLGFVDVQNCISR

SEQ ID NO: 785 - DNA, 8833 bp, Homo sapiens
cgccccccacgccctgggccccggagggccgcagccatgagtgaaatgtccagctttcttcacatcggggacatcgtctccctgtacgccgagggctccgtcaatggcttcatcagcactttggggctggtggatgaccgctgtgtggtggagcccgcggccggggacctggacaacccccctaagaagttccgtgactgcctcttcaaggtgtgccccatgaaccgctactcggcccagaagcagtactggaaggccaagcagactaagcaggacaaggagaagatcgctgatgtggtgttgctgcagaagctgcagcatgcggcgcagatggagcagaagcaaaatgacacggagaacaagaaggtgcatggggatgtcgtgaagtatggcagtgtgatccagctcctgcacatgaagagcaacaagtacctgacagtgaacaagcggcttccggccttgctggagaagaacgccatgcgggtgactctggatgccacaggcaacgagggttcctggctcttcatccagcccttctggaagctgcggagcaacggggacaacgtggtcgtgggggacaaggtgatcctgaatcctgtcaatgccgggcagcctctgcatgccagcaattacgagctcagcgacaacgccggctgcaaggaggtcaattctgtgaactgcaacaccagctggaagatcaacctgtttatgcagtttcgggaccacctggaggaggtgttgaaagggggagacgtggtgcggctgttccatgcggagcaggagaagttcctgacgtgtgacgagtacaagggcaagctgcaggtgttcctgcgaactacactgcgccagtctgccacctcggccaccagctccaatgctctctgggaggtggaggtggtccaccacgacccctgccgtggaggagctgggcactggaatggcttgtaccgcttcaagcacctggctacaggcaactacctggctgctgaggagaaccccagttacaaaggtgatgcctcagatcccaaggcagcaggaatgggggcacagggccgcacaggccgcaggaatgctggggagaagatcaagtactgcctggtggctgtgcctcatggcaatgacatcgcctctctctttgagctggaccccaccaccttgcagaaaaccgactctttcgtgccccggaactcgtacgtccggctgcggcacctctgcaccaacacgtggattcagagcaccaatgtgcccattgacatcgaggaggagcggcccatccggctcatgctgggcacctgccccaccaaggaggacaaggaggcctttgccatcgtgtcagtgcccgtgtctgagatccgagacctggactttgccaatgacgccagctccatgctggccagtgccgtggagaaactcaacgagggcttcatcagccagaatgaccgcaggtttgtcatccagctgctggaagacctggtgttctttgtcagcgatgtccccaacaatgggcagaatgtcctggacatcatggtcactaagcccaaccgggaacggcagaagctgatgagggagcagaacatcctcaaacaggtctttggcattctgaaggtcccgttccgtgagaaggggggtgaaggtcccctggtgcggctggaggagctgtcagaccagaagaacgccccctaccagcacatgttccgcctgtgctaccgtgtgttgcggtattcccaggaggactaccgcaagaaccaggagcacattgccaagcagtttgggatgatgcagtcccagattggctacgacatcctggccgaggacaccatcactgccctgctgcacaacaaccgcaagctcctggaaaagcacatcaccaagaccgaggtggagaccttcgtcagccttgtgcgcaagaaccgggagcccaggttcctggactacctctctgacctgtgtgtgtccaaccacatcgccatccccgtcacccaagagctcatctgcaagtgtgtgctggaccccaagaacagtgacattctcatccggaccgagcttcggcccgtgaaggagatggcccaatcccacgagtacctgagcatcgagtactcagaagaggaagtgtggctcacgtggactgacaagaataacgagcatcatgagaagagtgtgaggcagctggcccaggaggcgcgggccggcaacgcccacgacgagaatgtgctcagctactacaggtaccagctgaagctctttgcccgcatgtgcttggaccgccagtacttggccatcgacgagatctcccagcagctgggcgtggacctgattttcctgtgcatggcagacgagatgctgccctttgacctgcgcgcctccttctgccacctgatgctgcacgtgcacgtggaccgtgacccccaggagctggtcacgccggtcaagtttgcccgtctctggactgagatccccacagccatcaccatcaaggactatgattccaacctcaacgcgtcccgagatgacaagaagaacaagtttgccaacaccatggagttcgtggaggactacctcaacaatgtagtcagcgaggccgtgccctttgccaacgaggagaagaacaagctcacttttgaggtggtcagcctggcgcacaatctcatctacttcggcttctacagcttcagcgagctgctgcggctcactcgcacactgctgggcatcatcgactgtgtgcaggggcccccggccatgctgcaggcctatgaggaccccggtggcaagaatgtgcggcggtccatccagggcgtggggcacatgatgtccaccatggtgctgagccgcaagcagtccgtcttcagtgcccccagcctgtctgctggggccagtgctgctgagccgctggacagaagcaagtttgaggagaatgaggacattgtggtgatggagaccaagctgaagatcctggaaatccttcagttcatcctcaacgtccgcctggattaccgcatatcctacctgctgtctgtcttcaagaaggagtttgtggaggtgtttcccatgcaggacagtggggctgatggcacagcccctgccttcgactctaccactgccaacatgaacctggatcgcatcggggagcaggcggaggccatgtttggagtggggaagacaagcagcatgctggaggtggatgacgagggcggccgcatgttcctgcgcgtgctcatccacctcaccatgcacgactatgcgccactggtctcgggtgccctgcagctgctcttcaagcacttcagccagcgccaggaggccatgcacaccttcaagcaggttcagctgctgatctcagcgcaggacgtggagaactacaaggtgatcaagtcggagctggaccggctgcggaccatggtggagaagtcagagctgtgggtggacaagaagggcagtggcaagggtgaggaggtggaggcaggcaccgccaaggacaagaaagagcgtcccacggacgaggagggctttctgcacccaccaggggagaaaagcagtgagaactaccagatcgtcaagggcatcctggaaaggctgaacaagatgtgcggggttggggagcaaatgaggaagaagcagcaacggctgctgaagaacatggatgcccacaaggtcatgctggacctgctgcagatcccctatgacaagggtgatgccaagatgatggagatcctgcgctacacgcaccagttcctgcagaagttctgtgcagggaaccccggcaaccaggccctgctgcacaaacacctgcacctcttcctcacgccagggctcctggaggcagagaccatgcagcacatcttcctgaacaactatcagctctgctccgagatcagcgagcctgtgttgcagcacttcgtgcacctgctggccacgcacgggcgccatgtgcagtacctggacttcctgcacaccgtcattaaggccgagggcaagtacgtcaagaagtgccaggacatgatcatgactgagctgaccaatgcaggtgacgatgtggtcgtgttctacaatgataaggcatcgctggcccacctgctggacatgatgaaggccgcccgcgacggcgtggaggaccacagccccctcatgtaccacatttccctggtggacctgctggccgcctgtgccgagggcaaaaacgtctacactgagatcaagtgcacctccctcgtgccgctggaggacgtggtgtctgtggtgacgcatgaggactgcatcactgaggtgaaaatggcctatgtgaacttcgtgaaccactgctacgtggacacggaggtggagatgaaggagatctacaccagcaaccacatctggacgctctttgagaacttcaccctggacatggctcgggtctgcagcaagcgtgagaagcgcgtggctgaccccaccttggagaagtacgtgctgagcgttgtgctggacaccatcaacgccttcttcagctccccattctctgagaacagcacttccctgcagacacaccagccggttgtggtgcagctgctgcagtctaccacacgcctcctcgagtgtccgtggctacagcagcagcacaagggctccgtggaggcctgcatccggaccctcgccatggtggccaagggccgggccatcttgctgcccatggacctggatgcccacatcagctcgatgctcagcagtggagccagctgtgcagctgccgcccagcggaacgcctccagctacaaggcaaccacgcgggccttcccccgcgtcacccccaccgccaaccagtgggactacaagaacatcattgagaagctgcaggacatcatcacagccctggaggagcggctgaagcccctggtacaggctgagctgtccgtgctggtggatgtcctgcactggcctgagctgctcttcctggagggcagtgaggcctaccagcgctgcgagagtgggggcttcctgtccaagctgatccagcacaccaaggacctcatggagtcggaggagaagctgtgcatcaaggtgctgcggaccctgcagcagatgctcgtcaagaagaccaagtacggggaccggggcaaccagctgcgcaagatgctgctgcaaaactacctccagaaccggaagtccacctcgcggggggaccttcccgaccccataggcactggcctggacccagactggtcggcaatcgcagccacccagtgccggctggacaaggagggggccaccaagttggtatgcgacctcatcaccagcaccaagaacgagaagatcttccaggagagcatcggcctggccatccacctgctggatggtggcaacacagagatccagaaatccttccacaacctgatgatgagtgacaagaagtcagagcgcttcttcaaggtgctgcacgaccgcatgaagcgggcccagcaggagaccaagtccacggtggcagtcaacatgaatgacctgggcagccagccacatgaggaccgcgagccagtcgaccccaccaccaaaggccgcgtggcctccttctcgatacctggctcctcatcccgctactcgctgggccccagcctgcgccgggggcacgaggtgagcgaacgtgtgcagagcagtgagatgggcacatccgtgctcatcatgcagcccatcctgcgctttctgcagctgctgtgtgagaaccacaaccgggacctgcagaacttcctgcgctgtcagaacaacaaaaccaactacaacttggtatgcgagacgctgcagttcctggacatcatgtgcggcagcaccacgggcggcctggggctgctggggctctacatcaatgaggacaacgtgggcctcgtcatccagaccttggagaccctcactgagtactgccagggcccctgccatgagaaccagacttgcattgtgactcacgagtccaatggcatagacatcatcaccgcactgatcctcaatgacatcagccccctgtgcaagtaccgcatggatctggtgctgcagctcaaggacaatgcctccaagctgctcctggctctgatggagagccggcatgacagtgaaaatgctgagcgaatcctcatcagcctgcggccccaggagctggtggacgtcatcaagaaggcctacctgcaggaggaagagcgtgagaactcggaggtgagcccacgtgaagtgggccataacatctatatcctggcgctgcagctctccaggcacaataaacagctgcagcacctgctgaagccggtgaagcgcattcaagaggaggaggccgagggtatctcttccatgctcagcctcaacaacaagcagctgtcacagatgctcaagtcctcagcgccagcacaggaggaggaggaagaccccctggcctactatgagaaccacacgtcccagatcgagattgtgcggcaggaccgcagcatggagcagatcgtgttcccagtgcccggcatctgccagttcctgacggaggaaaccaagcaccggctcttcaccactactgagcaggacgagcagggcagcaaagtgagcgacttcttcgaccagtcctccttcctgcacaacgagatggagtggcagcgcaacgtccgcagcatgccgctgatctactggttctcccgccgcatgaccctgtggggcagcatctccttcaacctggccgtgtttatcaacatcatcattgccttcttctacccttacatggagggcgcgtccacaggcgtgctggactcccctctcatctcattgctcttctggatcctcatctgcttctccatcgcggccctgttcaccaagcgctacagcatccgccccctcatcgtggcgctcatcctgcgctccatctactatctgggcatcgggcccacactcaacatcctgggtgccctcaatctgaccaacaagatcgtgtttgtggtgagcttcgtgggcaaccgtggcaccttcatccggggctataaggccatggtcatggacatggaattcctctaccacgtgggctacatcctgaccagtgtcctgggcctctttgctcatgagctgttctacagcatcctgctctttgacctcatctaccgcgaggagacgctgttcaacgtcatcaagagtgtgacccgcaatggccgctccatcctgctgacagccctgctggccctcatcctggtctacctcttctccatcgtcggcttcctcttcctcaaggatgacttcattctcgaggtcgaccggctgcccaacaaccactccacagccagccccctggggatgccacatggagctgctgcatttgtggacacctgcagtggggacaagatggactgtgtctcagggctctcggtgcctgaggtcctggaagaggacagggagctggacagcacagagcgggcctgtgacactctgttgatgtgcatcgtcactgtcatgaaccatgggctacgcaacggtggtggcgtgggcgacattctccgcaagccctccaaagatgagtctctcttcccagcccgagtggtctatgacctcctgttcttcttcatcgtcatcatcattgtgctgaacctcatctttggggtaatcatcgacaccttcgctgacctgcgtagtgagaagcagaagaaggaggagattcttaagacgacatgcttcatctgtggtctggagagggacaagtttgataacaagacagtgtcatttgaggaacacatcaagctggagcacaacatgtggaactacttgtacttcattgtgctggtccgcgtgaagaacaagaccgactacacgggccctgagagctacgtggcccagatgatcaagaacaagaacctggactggttcccccggatgcgggccatgtcccttgtcagcaatgagggcgagggggagcagaatgagattcggattctccaggacaagctcaactccaccatgaagctggtgtcccacctcactgcccagctcaacgagctcaaggagcagatgacggagcagcggaaacgcaggcaacgcctaggctttgtggatgtccagaactgcattagccgctgaggagagccaccgaaggccccaacaggggatgctcatcactggagactgcgactgggaagaacactgccccctccctcgggttgggtggcccagccagctggccagcctccactcccactctgccagacaccctgacacccacccaggctttgaagagcatggagggggagcctcagagctgacagtcctgcttagagcccttaaaaagacttgaaagttcactgggactcagtttaccttaatgccttagcagaagataaatcctacctagagacctttgttccttaaagcaataactgacaactctttgtagtcctccttgtgggtagttaagagtggggtcacccctttaactccaagcactacattttggcggctgcggcctctgggggaggtggcagttatgctgttactagtgattttagggctttgttatttaacttatttcaagggtgctgtgctcagccctgcccatggctgtgcagctccctccgtgcctcagatctgctgtagccagtgcagacctcactgtcgtgtccatgccacccccggcatggctccaggtggcctggtgactccatgatggacgatcttgctcccaggacctgcctcttcccaggcttcctggggaagagttgtacgcccaggcaacaagggctgagctgcgcttgcgtggctgtttcatgaccgcttgtttttctccttttggtgtaatgttttacaaatcctttggcctgagaactaatatgttaattgccttaaataaattaatagaaatcta

SEQ ID NO: 786 - DNA, 732 bp, Homo sapiens
  misc_feature (359)..(359): n = a, c, g, or t
  misc_feature (362)..(362): n = a, c, g, or t
  misc_feature (420)..(420): n = a, c, g, or t
  misc_feature (424)..(424): n = a, c, g, or t
  misc_feature (431)..(432): n = a, c, g, or t
  misc_feature (436)..(436): n = a, c, g, or t
  misc_feature (445)..(445): n = a, c, g, or t
  misc_feature (450)..(450): n = a, c, g, or t
  misc_feature (482)..(482): n = a, c, g, or t
  misc_feature (485)..(485): n = a, c, g, or t
ttttttttttcaaggggacaggctccagcgtgctgccatgtgatagaagaatgatttattagaacaaattccatgacaaatcatataaaataaccattttccgaaagacagccacaagaccacctgagaacgaatgtacagtgaaccctccgagaagcccggcaaacaaggaccagttcccaggcaaaggctggagggggaggaacaaaggagctcattgtggggaggagcaggaacttgtgaacttaaaacattgcacagccactgccgaggggtgggaaggagccgtggatgaagcgtgaccacttcatgtccaggggcaggcggggtgggcaactggggcatgcaggggtgggcancancccggtggaccgggctagcacctcctccatacagacagcaggctcttggggcgggganccanggggacnncctnccacccccnccccncccccacccacacctaaactttaggtgggccnaanggctcaaaaagaaaaaacccttacacccgacctccactcatctaaaattaaccagggcacacacccaccgcttcagccttcatgctcaggcccttctccagaagttggccctgtcagtcccacttaataccagtgcaagcagggtgtgagcttacctcgccatcttgtacaagggggaacccctaggttctcccgcacaacaggggaaaggggctttttgggttaaagctcggcaaccgggctgccc

SEQ ID NO: 787 - protein, 61 aa, Homo sapiens
MDPNCSCTTGGSCACAGSCKCKECKCTSCKKCCCSCCPVGCAKCAQGCVCKGSSEKCRCCA

SEQ ID NO: 788 - DNA, 699 bp, Homo sapiens
cagctgtgactctcactctccccttcttccccaggctgctgctcttgctgccccgtgggctgtgccaagtgtgcccagggctgtgtctgcaaaggctcatcagagaagtgccgctgctgtgcctgatgttgggaaccctgctcccagacataaatagagcaaccagtactaacctggatttttttttttaactacctgaccggtttgctacattcttttttctattcaatatgtgaaaagacaataaaacacttttgacttgattctgactctccttttccttttctgtggcttggaaataacagttggagtgggggattgaactgggaatttaaagacctggttctggatggaaatgtgagcccctatagtctgaataccttcagcaagcccggttacctccctgagctcatcttctgtaaaatggactgcactgtgtggatcacatgacggggttggggggacatgcatgatcgcctcgggtcatgtcaaatgtgcaaatgtggcagagaaacttctccatttctcatttttattttctgatttccctgctcagcttcagtccctcatcagattttaggcttgaaagtgatgacggggtggaatccaactcctcagttgcttgagctcacacggggcttctcgaactccacagtgaagaaacattttctaattccaatccatcccaggcatgaattc

SEQ ID NO: 789 - protein, 158 aa, Homo sapiens
MSHGKGTDMLPEIAAAVGFLSSLLRTRGCVSEQRLKVFSGALQEALTEHYKHHWFPEKPSKGSGYRCIRINHKMDPIISRVASQIGLSQPQLHQLLPSELTLWVDPYEVSYRIGEDGSICVLYEEAPLAASCGLLTCKNQVLLGRSSPSKNYVMAVSS

SEQ ID NO: 790 - DNA, 2718 bp, Homo sapiens
cagggtaacgctgtcttgtggacccgcacttcccacccgagacctctcactgagcccgagccgcgcgcgacatgagccacgggaagggaaccgacatgctcccggagatcgccgccgccgtgggcttcctctccagcctcctgaggacccggggctgcgtgagcgagcagaggcttaaggtcttcagcggggcgctccaggaggcactcacagagcactacaaacaccactggtttcccgaaaagccgtccaagggctccggctaccgctgcattcgcatcaaccacaagatggaccccatcatcagcagggtggccagccagatcggactcagccagccccagctgcaccagctgctgcccagcgagctgaccctgtgggtggacccctatgaggtgtcctaccgcattggggaggacggctccatctgcgtcttgtacgaggaggccccactggccgcctcctgtgggctcctcacctgcaagaaccaagtgctgctgggccggagcagcccctccaagaactacgtgatggcagtctccagctaggcccttccgcccccgccctgggcgccgccgtgctcatgctgccgtgacaacaggccaccacatacctcaacctggggaactgtatttttaaatgaagagctatttatatatattatttttttttaagaaaggaggaaaagaaaccaaaagttttttttaagaaaaaaaatccttcaagggagctgcttggaagtggcctccccaggtgcctttggagagaactgttgcgtgcttgagtctgtgagccagtgtctgcctataggagggggagctgttagggggtagacctagccaaggagaagtgggagacgtttggctagcaccccaggaagatgtgagagggagcaagcaaggttagcaactgtgaacagagaggtcgggatttgccctgggggaggaagagaggccaagttcagagctctctgtctcccccagccagacacctgcatccctggctcctctattactcaggggcattcatgcctggacttaaacaatactatgttatcttttcttttatttttctaatgaggtcctgggcagagagtgaaaaggcctctcctgattcctactgtcctaagctgcttttcttgaaatcatgacttgtttctaattctaccctcaggggcctgtagatgttgctttccagccaggaatctaaagctttgggttttctgaggggggggaggagggaactggaggttattggggttaggatggaagggaactctgcacaaaacctttgctttgctagtgctgctttgtgtgtatgtgtggcaaataatttgggggtgatttgcaatgaaattttgggacccaaagagtatccactggggatgttttttggccaaaactcttccttttggaaccacatgaaagtcttgatgctgctgccatgatccctttgagaggtggctcaaaagctacagggaactccaggtcctttattactgccttcttttcaaaagcacaactctcctctaaccctcccctcccccttcccttctggtcgggtcatagagctaccgtattttctaggacaagagttctcagtcactgtgcaatatgccccctgggtcccaggagggtctggaggaaaactggctatcagaacctcctgatgccctggtgggcttagggaaccatctctcctgctctccttgggatgatggctggctagtcagccttgcatgtattccttggctgaatgggagagtgccccatgttctgcaagactacttggtattcttgtagggccgacactaaataaaagccaaaccttgggcactgttttttctccctggtgctcagagcacctgtgggaaaggttgctgtctgtctcagtacaatccaaatttgtcgtagacttgtgcaatatatactgttgtgggttggagaaaagtggaaagctacactgggaagaaactcccttccttcaatttctcagtgacattgatgaggggtcctcaaaagacctcgagtttcccaaaccgaatcaccttaagaaggacagggctagggcatttggccaggatggccaccctcctgctgttgccccttagtgaggaatcttcaccccacttcctctacccccaggttctcctccccacagccagtcccctttcctggatttctaaactgctcaattttgactcaaaggtgctatttaccaaacactctccctacccattcctgccagctctgcctccttttcaactctccacattttgtattgccttcccagacctgcttccagtctttattgctttaaagttcactttgggcccacagacccaagagctaattttctggtttgtgggttgaaacaaagctgtgaatcactgcaggctgtgttcttgcatcttgtctgcaaacaggtccctgcctttttagaagcagcctcatggtctcatgcttaatcttgtctctcttctcttctttatgatgttcactttaaaaacaacaaaacccctgagctggactgttgagcaggcctgtctctcctattaagtaaaaataaatagtagtagtatgtttgtaagctattctgacagaaaagacaaaggttactaattgtatgatagtgtttttatatggaagaatgtacagcttatggacaaatgtacacctttttgttactttaataaaaatgtagtaggataaaaaaaaa

SEQ ID NO: 791 - protein, 194 aa, Homo sapiens
MEEKLKKTKIIFVVGGPGSGKGTQCEKIVQKYGYTHLSTGDLLRSEVSSGSARGKKLSEIMEKGQLVPLETVLDMLRDAMVAKVNTSKGFLIDGYPREVQQGEEFERRIGQPTLLLYVDAGPETMTQRLLKRGETSGRVDDNEETIKKRLETYYKATEPVIAFYEKRGIVRKVNAEGSVDSVFSQVCTHLDALK

SEQ ID NO: 792 - DNA, 2271 bp, Homo sapiens
gcacgcactggccccggcgcccacccgcacccctccccagagagcactgacacggctcccgggacctcggcaggatggaagagaagctgaagaaaaccaagatcatctttgtggtgggtgggcctggctcagggaagggcacccagtgtgagaagatcgtgcagaagtatggctacacccacctctccaccggggacctcctgcggtccgaggtcagctcaggctcggccaggggcaagaagctgtcggaaatcatggagaaggggcagctggttccactggagacagtgttggacatgctccgggatgccatggtggccaaagtcaatacttccaaaggcttcctgattgatggctacccgcgggaggtgcagcaaggagaagagtttgagcgacggattggacagcccacactgctgctgtatgtggacgcaggccctgagaccatgacccagcggctcttgaaacgtggagagaccagcgggcgtgtggacgacaatgaggagaccatcaaaaagcggctggagacctattacaaggccacagaacccgtcatcgccttctatgagaaacgtggcattgtgcgcaaggtcaacgctgagggctccgtggacagtgtcttctcccaggtctgcacccacctggacgccctaaagtagcaacgctggagccgcttccccagctcagagccccgccccaccccgtcctgattagaggtcctcctggcctgagcgcagcgcctccaccctgccctgctgagcacagacggaggaagccgcttatcctgttttcatggacagctgagcactaaaggaatttctaaggacatttggttttactgctttttctctgcttccagttggagttgattcatgtgcttgtgcctacctggccgcaagtccccagcccctcaaccctccgttcctcctcagcctccctttgccagccacccctcctctagctctggtgggaggcccggggcccttcctcgcacagggcatgcctggcctgaggacccggcgctgagtggcggggcccctgctccgaggggctcatgttcaggcagaaccggtcccagcctgggctcctctgcatcttgctctgtgccttggccctgacccccatcgctctgagcatatgttccatgcctgccttgccggggcctggactgcacaggcagcaaggtcatggtctgagtggggcttcctgggcagttggggcggcccacgccagctggcccagtgggtagtgaattggcttccttgacgcgagaggctctgagggtctgaaaagggcatctcaatggcatgggtgggtggggagtcagtcatgtcactgaaattgaatgggggaggcccaatgaggtggctcatgcctgtaatcccagcactttgggaagctgaggcaggaggatcacctgaggtcaggagttcgagagcagcctggccaacatggcaaaaccccttatttactaaaaatacaaaaacttagccgggcatggtggcatgtgcctgtattcccagctactcatgaggctgaggcaggagaatggcgtgaacccgggagtggagcttgcaatgagccaagattgcgccactgcactccagcctgggtgacagagcaagactccgtctcaaaaaaaaaaaaaaaaaaaaagaaattaattgggggagtcatggtcaggggtgagacctgaaggacctccccctgtgtggccctggacacagcccaccctctgtgagccgtttccaattctaaaacagactcaatgtccccctcacccccacctcaaggtcaggatgcgaacacactgagtgaggagtggacgctgtccattgccacggccatgagggctggagaccagaacagcatggcccgaagcgtgcggggccccggatgacttggggacaccccagaatcccctggggagaacccttcctgcgcgctttcattttttgacctcatcactgagaaaggctcaatttggtgctcacgtgtccttaacacctgatctggcccaagctgcgtgccctttaagccaagagagcctcttgtggaccccgcctgcccgaatgaaatccgaacagttggggctgttatggcaagtggggctggtttttcatttccattggttatttaaagtttcctttaaaataaacgattttaagttataaaaggtgaatctattgaaagaagaacatcaaagaaataaacaggagttcagcggagtagcagaagacaaggcatgtagggggagccattctgtcccag

SEQ ID NO: 793 - protein, 417 aa, Homo sapiens
MEQRPRGCAAVAAALLLVLLGARAQGGTRSPRCDCAGDFHKKIGLFCCRGCPAGHYLKAPCTEPCGNSTCLVCPQDTFLAWENHHNSECARCQACDEQASQVALENCSAVADTRCGCKPGWFVECQVSQCVSSSPFYCQPCLDCGALHRHTRLLCSRRDTDCGTCLPGFYEHGDGCVSCPTSTLGSCPERCAAVCGWRQMFWVQVLLAGLVVPLLLGATLTYTYRHCWPHKPLVTADEAGMEALTPPPATHLSPLDSAHTLLAPPDSSEKICTVQLVGNSWTPGYPETQEALCPQVTWSWDQLPSRALGPAAAPTLSPESPAGSPAMMLQPGPQLYDVMDAVPARRWKEFVRTLGLREAEIEAVEVEIGRFRDQQYEMLKRWRQQQPAGLGAVYAALERMGLDGCVEDLRSRLQRGP

SEQ ID NO: 794 - DNA, 1638 bp, Homo sapiens
cgggccctgcgggcgcggggctgaaggcggaaccacgacgggcagagagcacggagccgggaagcccctgggcgcccgtcggagggctatggagcagcggccgcggggctgcgcggcggtggcggcggcgctcctcctggtgctgctgggggcccgggcccagggcggcactcgtagccccaggtgtgactgtgccggtgacttccacaagaagattggtctgttttgttgcagaggctgcccagcggggcactacctgaaggccccttgcacggagccctgcggcaactccacctgccttgtgtgtccccaagacaccttcttggcctgggagaaccaccataattctgaatgtgcccgctgccaggcctgtgatgagcaggcctcccaggtggcgctggagaactgttcagcagtggccgacacccgctgtggctgtaagccaggctggtttgtggagtgccaggtcagccaatgtgtcagcagttcacccttctactgccaaccatgcctagactgcggggccctgcaccgccacacacggctactctgttcccgcagagatactgactgtgggacctgcctgcctggcttctatgaacatggcgatggctgcgtgtcctgccccacgagcaccctggggagctgtccagagcgctgtgccgctgtctgtggctggaggcagatgttctgggtccaggtgctcctggctggccttgtggtccccctcctgcttggggccaccctgacctacacataccgccactgctggcctcacaagcccctggttactgcagatgaagctgggatggaggctctgaccccaccaccggccacccatctgtcacccttggacagcgcccacacccttctagcacctcctgacagcagtgagaagatctgcaccgtccagttggtgggtaacagctggacccctggctaccccgagacccaggaggcgctctgcccgcaggtgacatggtcctgggaccagttgcccagcagagctcttggccccgctgctgcgcccacactctcgccagagtccccagccggctcgccagccatgatgctgcagccgggcccgcagctctacgacgtgatggacgcggtcccagcgcggcgctggaaggagttcgtgcgcacgctggggctgcgcgaggcagagatcgaagccgtggaggtggagatcggccgcttccgagaccagcagtacgagatgctcaagcgctggcgccagcagcagcccgcgggcctcggagccgtttacgcggccctggagcgcatggggctggacggctgcgtggaagacttgcgcagccgcctgcagcgcggcccgtgacacggcgcccacttgccacctaggcgctctggtggcccttgcagaagccctaagtacggttacttatgcgtgtagacattttatgtcacttattaagccgctggcacggccctgcgtagcagcaccagccggccccacccctgctcgcccctatcgctccagccaaggcgaagaagcacgaacgaatgtcgagagggggtgaagacatttctcaacttctcggccggagtttggctgagatcgcggtattaaatctgtgaaagaaaacaaaacaaaacaaaaaaaaaaaaaaaaaa

SEQ ID NO: 795 - protein, 967 aa, Homo sapiens
MAKGFYISKSLGILGILLGVAAVCTIIALSVVYSQEKNKNANSSPVASTTPSASATTNPASATTLDQSKAWNRYRLPNTLKPDSYQVTLRPYLTPNDRGLYVFKGSSTVRFTCKEATDVIIIHSKKLNYTLSQGHRVVLRGVGGSQPPDIDKTELVEPTEYLVVHLKGSLVKDSQYEMDSEFEGELADDLAGFYRSEYMEGNVRKVVATTQMQAADARKSFPCFDEPAMKAEFNITLIHPKDLTALSNMLPKGPSTPLPEDPNWNVTEFHTTPKMSTYLLAFIVSEFDYVEKQASNGVLIRIWARPSAIAAGHGDYALNVTGPILNFFAGHYDTPYPLPKSDQIGLPDFNAGAMENWGLVTYRENSLLFDPLSSSSSNKERVVTVIAHELAHQWFGNLVTIEWWNDLWLNEGFASYVEYLGADYAEPTWNLKDLMVLNDVYRVMAVDALASSHPLSTPASEINTPAQISELFDAISYSKGASVLRMLSSFLSEDVFKQGLASYLHTFAYQNTIYLNLWDHLQEAVNNRSIQLPTTVRDIMNRWTLQMGFPVITVDTSTGTLSQEHFLLDPDSNVTRPSEFNYVWIVPITSIRDGRQQQDYWLIDVRAQNDLFSTSGNEWVLLNLNVTGYYRVNYDEENWRKIQTQLQRDHSAIPVINRAQIINDAFNLASAHKVPVTLALNNTLFLIEERQYMPWEAALSSLSYFKLMFDRSEVYGPMKNYLKKQVTPLFIHFRNNTNNWREIPENLMDQYSEVNAISTACSNGVPECEEMVSGLFKQWMENPNNNPIHPNLRSTVYCNAIAQGGEEEWDFAWEQFRNATLVNEADKLRAALACSKELWILNRYLSYTLNPDLIRKQDATSTIISITNNVIGQGLVWDFVQSNWKKLFNDYGGGSFSFSNLIQAVTRRFSTEYELQQLEQFKKDNEETGFGSGTRALEQALEKTKANIKWVKENKEVVLQWFTENSK

SEQ ID NO: 796 - DNA, 3494 bp, Homo sapiens
taatttttgcccagtctgcctgttgtggggctcctcccctttggggatataagcccggcctggggctgctccgttctctgcctggcctgaggctccctgagccgcctccccaccatcaccatggccaagggcttctatatttccaagtccctgggcatcctggggatcctcctgggcgtggcagccgtgtgcacaatcatcgcactgtcagtggtgtactcccaggagaagaacaagaacgccaacagctcccccgtggcctccaccaccccgtccgcctcagccaccaccaaccccgcctcggccaccaccttggaccaaagtaaagcgtggaatcgttaccgcctccccaacacgctgaaacccgattcctaccaggtgacgctgagaccgtacctcacccccaatgacaggggcctgtacgtttttaagggctccagcaccgtccgtttcacctgcaaggaggccactgacgtcatcatcatccacagcaagaagctcaactacaccctcagccaggggcacagggtggtcctgcgtggtgtgggaggctcccagccccccgacattgacaagactgagctggtggagcccaccgagtacctggtggtgcacctcaagggctccctggtgaaggacagccagtatgagatggacagcgagttcgagggggagttggcagatgacctggcgggcttctaccgcagcgagtacatggagggcaatgtcagaaaggtggtggccactacacagatgcaggctgcagatgcccggaagtccttcccatgcttcgatgagccggccatgaaggccgagttcaacatcacgcttatccaccccaaggacctgacagccctgtccaacatgcttcccaaaggtcccagcaccccacttccagaagaccccaactggaatgtcactgagttccacaccacgcccaagatgtccacgtacttgctggccttcattgtcagtgagttcgactacgtggagaagcaggcatccaatggtgtcttgatccggatctgggcccggcccagtgccattgcggcgggccacggcgattatgccctgaacgtgacgggccccatccttaacttctttgctggtcattatgacacaccctacccactcccaaaatcagaccagattggcctgccagacttcaacgccggcgccatggagaactggggactggtgacctaccgggagaactccctgctgttcgaccccctgtcctcctccagcagcaacaaggagcgggtggtcactgtgattgctcatgagctggcccaccagtggttcgggaacctggtgaccatagagtggtggaatgacctgtggctgaacgagggcttcgcctcctacgtggagtacctgggtgctgactatgcggagcccacctggaacttgaaagacctcatggtgctgaatgatgtgtaccgcgtgatggcagtggatgcactggcctcctcccacccgctgtccacacccgcctcggagatcaacacgccggcccagatcagtgagctgtttgacgccatctcctacagcaagggcgcctcagtcctcaggatgctctccagcttcctgtccgaggacgtattcaagcagggcctggcgtcctacctccacacctttgcctaccagaacaccatctacctgaacctgtgggaccacctgcaggaggctgtgaacaaccggtccatccaactccccaccaccgtgcgggacatcatgaaccgctggaccctgcagatgggcttcccggtcatcacggtggataccagcacggggaccctttcccaggagcacttcctccttgaccccgattccaatgttacccgcccctcagaattcaactacgtgtggattgtgcccatcacatccatcagagatggcagacagcagcaggactactggctgatagatgtaagagcccagaacgatctcttcagcacatcaggcaatgagtgggtcctgctgaacctcaatgtgacgggctattaccgggtgaactacgacgaagagaactggaggaagattcagactcagctgcagagagaccactcggccatccctgtcatcaatcgggcacagatcattaatgacgccttcaacctggccagtgcccataaggtccctgtcactctggcgctgaacaacaccctcttcctgattgaagagagacagtacatgccctgggaggccgccctgagcagcctgagctacttcaagctcatgtttgaccgctccgaggtctatggccccatgaagaactacctgaagaagcaggtcacacccctcttcattcacttcagaaataataccaacaactggagggagatcccagaaaacctgatggaccagtacagcgaggttaatgccatcagcaccgcctgctccaacggagttccagagtgtgaggagatggtctctggccttttcaagcagtggatggagaaccccaataataacccgatccaccccaacctgcggtccaccgtctactgcaacgctatcgcccagggcggggaggaggagtgggacttcgcctgggagcagttccgaaatgccacactggtcaatgaggctgacaagctccgggcagccctggcctgcagcaaagagttgtggatcctgaacaggtacctgagctacaccctgaacccggacttaatccggaagcaggacgccacctctaccatcatcagcattaccaacaacgtcattgggcaaggtctggtctgggactttgtccagagcaactggaagaagctttttaacgattatggtggtggctcgttctccttctccaacctcatccaggcagtgacacgacgattctccaccgagtatgagctgcagcagctggagcagttcaagaaggacaacgaggaaacaggcttcggctcaggcacccgggccctggagcaagccctggagaagacgaaagccaacatcaagtgggtgaaggagaacaaggaggtggtgctccagtggttcacagaaaacagcaaatagtccccagcccttgaagtcacccggccccgatgcaaggtgcccacatgtgtccatcccagcggctggtgcagggcctccattcctggagcccgaggcaccagtgtcctcccctcaaggacaaagtctccagcccacgttctctctgcctgtgagccagtctagttcctgatgacccaggctgcctgagcacctcccagcccctgcccctcatgccaaccccgccctaggcctggcatggcacctgtcgcccagtgccctggggctgatctcagggaagcccagctccagggccagatgagcagaagctctcgatggacaatgaacggccttgctgggggccgccctgtaccctctttcacctttccctaaagaccctaaatctgaggaatcaacagggcagcagatctgtatatttttttctaagagaaaatgtaaataaaggatttctagatgaaaaaaaaaaaaaaaaa

SEQ ID NO: 797 - protein, 165 aa, Homo sapiens
MTLEEFSAGEQKTERMDKVGDALEEVLSKALSQRTITVGVYEAAKLLNVDPDNVVLCLLAADEDDDRDVALQIHFTLIQAFCCENDINILRVSNPGRLAELLLLETDAGPAASEGAEQPPDLHCVLVTNPHSSQWKDPALSQLICFCRESRYMDQWVPVINLPER

SEQ ID NO: 798 - DNA, 1355 bp, Homo sapiens
cagtggctggtaggcagtggctgggaggcagcggcccaattagtgtcgtgcggcccgtggcgaggcgaggtccggggagcgagcgagcaagcaaggcgggaggggtggccggagctgcggcggctggcacaggaggaggagcccgggcgggcgaggggcggccggagagcgccagggcctgagctgccggagcggcgcctgtgagtgagtgcagaaagcaggcgcccgcgcgctagccgtggcaggagcagcccgcacgccgcgctctctccctgggcgacctgcagtttgcaatatgactttggaggaattctcggctggagagcagaagaccgaaaggatggataaggtgggggatgccctggaggaagtgctcagcaaagccctgagtcagcgcacgatcactgtcggggtgtacgaagcggccaagctgctcaacgtcgaccccgataacgtggtgttgtgcctgctggcggcggacgaggacgacgacagagatgtggctctgcagatccacttcaccctgatccaggcgttttgctgcgagaacgacatcaacatcctgcgcgtcagcaacccgggccggctggcggagctcctgctcttggagaccgacgctggccccgcggcgagcgagggcgccgagcagcccccggacctgcactgcgtgctggtgacgaatccacattcatctcaatggaaggatcctgccttaagtcaacttatttgtttttgccgggaaagtcgctacatggatcaatgggttccagtgattaatctccctgaacggtgatggcatctgaatgaaaataactgaaccaaattgcactgaagtttttgaaatacctttgtagttactcaagcagttactccctacactgatgcaaggattacagaaactgatgccaaggggctgagtgagttcaactacatgttctgggggcccggagatagatgactttgcagatggaaagaggtgaaaatgaagaaggaagctgtgttgaaacagaaaaataagtcaaaaggaacaaaaattacaaagaaccatgcaggaaggaaaactatgtattaatttagaatggttgagttacattaaaataaaccaaatatgttaaagtttaagtgtgcagccatagtttgggtatttttggtttatatgccctcaagtaaaagaaaagccgaaagggttaatcatatttgaaaaccatattttattgtattttgatgagatattaaattctcaaagttttattataaattctactaagttattttatgacatgaaaagttatttatgctataaattttttgaaacacaatacctacaataaactggtatgaataattgcatcatt

SEQ ID NO: 799 - protein, 1384 aa, Homo sapiens
ELWSLRTMDALNRNQIGPGCQTQTMVQKGPLDLIETGKGLKVQTDKPHLVSLGSGRLSTAITLLPLEEGRTVIGSAARDISLQGPGLAPEHCYIENLRGTLTLYPCGNACTIDGLPVRQPTRLTQGCMLCLGQSTFLRFNHPAEAKWMKSMIPAGGRAPGPPYSPVPAESESLVNGNHTPQTATRGPSACASHSSLVSSIEKDLQEIMDSLVLEEPGAAGKKPAATSPLSPMANGGRYLLSPPTSPGAMSVGSSYENTSPAFSPLSSPASSGSCASHSPSGQEPGPSVPPLVPARSSSYHLALQPPQSRPSGARSESPRLSRKGGHERPPSPGLRGLLTDSPAATVLAEARRATESPRLGGQLPVVAISLSEYPASGALSQPTSIPGSPKFQPPVPAPRNKIGTLQDRPPSPFREPPGSERVLTTSPSRQLVGRTFSDGLATRTLQPPESPRLGRRGLDSMRELPPLSPSLSRRALSPLPTRTTPDPKLNREVAESPRPRRWAAHGASPEDFSLTLGARGRRTRSPSPTLGESLAPHKGSFSGRLSPAYSLGSLTGASPCQSPCVQRKLSSGDLRVPVTRERKNSITEISDNEDDLLEYHRRQRQERLREQEMERLERQRLETILNLCAEYSRADGGPEAGELPSIGEATAALALAGRRPSRGLAGASGRSSEEPGVATQRLWESMERSDEENLKEECSSTESTQQEHEDAPSTKLQGEVLALEEERAQVLGHVEQLKVRVKELEQQLQESAREAEMERALLQGEREAERALLQKEQKAVDQLQEKLVALETGIQKERDKEAEALETETKLFEDLEFQQLERESRVEEERELAGQGLLRSKAELLRSIAKRKERLAILDSQAGQIRAQAVQESERLARDKNASLQLLQKEKEKLTVLERRYHSLTGGRPFPKTTSTLKEMEKLLLPAVDLEQWYQELMAGLGTGPAAASPHSSPPPLPAKASRQLQVYRSKMDGEATSPLPRTRSGPLPSSSGSSSSSSQLSVATLGRSPSPKSALLTQNGTGSLPRNLAATLQDIETKRQLALQQKGQQVIEEQRRRLAELKQKAAAEAQCQWDALHGAAPFPAGPSGFPPLMHHSILHHLPAGRERGEEGEHAYDTLSLESSDSMETSISTGGNSACSPDNMSSASGLDMGKIEEMEKMLKEAHAEKNRLMESREREMELRRQALEEERRRREQVERRLQSESARRQQLVEKEVKMREKQFSQARPLTRYLPIRKEDFDLKTHIESSGHGVDTCLHVVLSSKVCRGYLVKMGGKIKSWKKRWFVFDRLKRTLSYYVDKHETKLKGVIYFQAIEEVYYDHLRSAAKKRFFRFTMVTESPNPALTFCVKTHDRLYYMVAPSAEAMRIWMDVIVTGAEGYTQFMN

SEQ ID NO: 800 - DNA, 5449 bp, Homo sapiens
cccacgcgtccgaagcctgaggccaccgcgaccgagccgagccaggctaagggaccagtgtctccctgccccccccccacctctaggagctctggagccttaggaccatggacgctctcaataggaaccaaataggccctggatgccagacccagaccatggtgcagaaaggacccttggacctgatcgagacaggcaaagggctgaaagtgcaaacggacaaaccccacctggtgagcctgggcagtgggcgactcagcacagccatcaccctcctgccgctggaggaagggaggacggtgattggctctgcagccagagacatctcactacagggcccaggcctggctccagagcactgctacatcgagaacctgcggggcaccctcaccctctacccctgtggcaatgcctgcactattgatgggctccctgtccggcagcctacccggctcactcagggctgcatgttgtgcctgggtcagtccaccttccttcgctttaaccacccggctgaagccaagtggatgaaaagcatgattccagcagggggccgagcccctgggcccccctacagccctgttcctgcagaatcagaaagtctggtaaatgggaaccacaccccacagactgcaacacggggaccctctgcctgtgccagccacagttccctggtgagctctattgagaaggacctgcaagagatcatggactcactggtgctagaggagcctggagctgctggcaagaagcctgccgcaacctctccactgtcaccgatggctaatggtgggcgctacctgctgtctcccccaaccagccccggcgccatgtctgtgggctccagctatgagaacacctctccagccttctctccactctcttcaccagccagcagtggaagctgtgccagtcactcacccagtgggcaagagccaggaccttctgtgcccccgctggtacctgcccgttcctccagctaccatctggccctacagcccccacagtcccgcccaagtggtgctcgctccgagagtcctcggctgagcaggaaagggggccatgagaggcctcccagccctggcctccggggtctgctgacagacagccctgcagctactgtcttggcggaggcccggagagccactgagagcccccggctgggtgggcagctgcctgtggtggccatcagcctgagtgaatacccagcttctggtgctctcagtcaacccaccagcattcctggcagccccaagtttcagcctccagtccctgctccccgaaacaagattggcacactccaggaccgccctcccagccctttccgtgagcctccaggcagtgagcgggtgctaacaaccagcccctcacgccaactggtgggccgaacattttcagatgggttagccacccgtaccctgcagcctcctgagagtccccgcctgggccggcggggcctggacagtatgcgagaactaccccccttaagtccatctctgtcccggcgagctctctccccgctgcccacccggaccaccccagatcccaagctaaacagggaagtggcagagagtcctcggccccggcgctgggcagcccatggggcttcaccagaggacttctccctgacgctgggggcacggggccgtaggacacggagcccctcacccacactgggtgagtctctggcaccccacaagggcagcttcagtggcaggctgagcccagcctacagtctgggctctcttactggggcttcaccctgccagagtccctgtgtccagaggaagctctccagcggggacttgcgggtgcctgtcacaagggagcggaaaaatagcatcacagagatcagtgacaatgaggacgacctcctggagtaccaccggcgacagcgccaagagcggctccgggagcaggagatggagaggctggaacgccagcgcctggagaccatcctgaacctgtgtgccgaatacagccgggctgatgggggacctgaggctggggagcttcccagcattggggaggccaccgcagcattggcactggcaggccggaggccctcacgaggccttgcaggggcctctgggcggagcagcgaggagcctggcgttgccacccaacgcctatgggagagtatggagcgctcagatgaggaaaatctcaaggaggagtgcagcagcactgagagcacccagcaggagcacgaagatgcacctagcaccaagctccagggagaggtgctagccctggaagaagagcgggctcaggtgctggggcacgtggagcagctcaaggtccgtgtgaaggagctagagcagcagctgcaggagtcagcccgagaggccgaaatggagcgggcactgctgcagggagagagggaggcagagcgggcactgctgcagaaggagcagaaggcagtggatcagctgcaggagaagctggtggccttggagacaggcatccagaaggagagggacaaggaggcagaggccctggagactgagacaaagctctttgaggacttggagttccagcagttggagcgggagagccgcgtggaggaggagcgcgagctggccggccaggggctgctccggagcaaggctgagctgctccgcagcatcgccaagaggaaggagcgcctggccatcctggacagtcaggctgggcagatccgggctcaggccgtgcaggagtcagaacgcctggcccgggacaagaatgcctccttacagctgctgcaaaaggagaaggagaagctgactgtgctggaaaggagataccactcactcacagggggcaggcctttcccgaagaccacatcgaccctcaaagagatggagaagctgctgctccctgctgtagacttagagcagtggtaccaggagctgatggccgggctggggactggccccgctgcagcctcccctcactcttctcccccgcctctgcccgccaaagcttcccgtcagctgcaggtttaccgctccaagatggatggcgaggccaccagcccccttccccggacccgcagcggccccctcccctcctcctctggctcttcctcctcctcctcccagctcagcgtggctaccctggggcgtagcccctccccaaagagcgctctactcacccagaatggcacgggcagccttcctcgcaacctggcagccacactgcaggacatcgagaccaagcgccaactagctctgcagcagaagggacaacaagtgattgaagagcagcggcggcgactggctgagctgaagcagaaagcggcagctgaggcacagtgccagtgggatgcccttcacggggcagcacccttcccagcgggcccctcgggcttcccccctctcatgcaccactctatcctacaccacctgcctgcggggcgggagcgtggggaggagggtgagcacgcctatgatacgctgagtctggagagctctgacagcatggagaccagcatctccaccgggggcaactcggcctgctcccctgacaacatgtccagcgcgagtggtctggacatggggaagatcgaggagatggagaagatgctgaaagaggctcatgcagagaagaaccggctcatggagtcgagggagcgggagatggagctgcggcggcaggccctggaggaggagcggcggaggcgtgagcaggtagaacggaggctgcagagtgagagtgcccggaggcagcagctggtcgagaaggaggtcaagatgcgggagaaacaattttcccaggcacgacccctgacccgctacctgccaatccggaaggaggactttgacctgaagacacatattgagtcatcgggccatggtgttgatacctgcctgcacgtggtgctcagcagcaaggtctgccgtggctacttggtcaagatgggcggcaagattaaatcatggaagaagcgctggtttgtcttcgaccggctcaagcgcaccctttcctattatgtggacaagcatgagacgaagctgaagggagtcatctatttccaggccattgaggaagtgtactacgaccacctgcgcagtgcagccaagaagaggtttttccgcttcactatggtgactgagagcccgaacccagccctcaccttctgcgtaaagacccatgaccggctgtactacatggtggccccatctgcagaggccatgcgtatctggatggatgtcattgtcacaggggctgagggctacactcagttcatgaactaactgtcgtgggcctcctggcagagcacaactggggcttttgtataagaagactttaatattctgtaaggagcttggtcctgtgagtttctgggctctggcctcctgaagaaccagccagaagaagaaaagtagaggtggctttgctgcctcctgggagcccagaacttgcagtaaccctttagggtcctgccccaggcccagccagggctgaggagctgtcacagagagggcctcagctctgacctgacacctgctctccccagcctgttttctcttttctaaaagacaaattatggtaccataagctgccaaagatcccctcctgcctcagacccctttgccaggggctttgggggctgagcagagccacatccagagtggggtaatagctcaggcggcccgcttcccatttctcaaaccccgctctgccccattgttctcctttcccttatactttttattaccttgctcaagggccagagatctcaagtgtcaaccttgaggtcccagctccatcccctagttgcagactcatcaccatggttaccatagtgactgcttcattgccatggttacatactaattgctgcagctctgtggcccagcccactgcttcagctgtgggccatctgagggtacgtgccatcatctctccagcccaggcccctgggcatctcatgctggggggaagggactgaatacctttttccttccccctgcctgtgtcttcagccctgatgcacaggctgccagccccccagtccagccctctcccttccactggtgccttgcttagagccagaagggatgaagccgggggatctatggaacagaggaggagcgatgcagttgggagaggaagctagaagggttatggttggagttctgtacagtgttgagtttccgacagggaaagaggattcctccaatgcgcctagagagaaagcctgagcaggagatgatgcagcagaggggaagggccctgtggtgccgccgcccttccttcagcctccgaagggtgatggaaatggagagtggaggaccaggcctccagctgtctggcctcgcccttcacgccttaacactaagcccacctcccctgctctccttcccagcattgagcccttggttgcctgggcccaggctgggggttttcagtatttgtaagcatttcagcagaacaataaagcctttggactacggaagtg

SEQ ID NO: 801 - protein, 1066 aa, Homo sapiens
MPVFHTRTIESILEPVAQQISHLVIMHEEGEVDGKAIPDLTAPVAAVQAAVSNLVRVGKETVQTTEDQILKRDMPPAFIKVENACTKLVQAAQMLQSDPYSVPARDYLIDGSRGILSGTSDLLLTFDEAEVRKIIRVCKGILEYLTVAEVVETMEDLVTYTKNLGPGMTKMAKMIDERQQELTHQEHRVMLVNSMNTVKELLPVLISAMKIFVTTKNSKNQGIEEALKNRNFTVEKMSAEINEIIRVLQLTSWDEDAWASKDTEAMKRALASIDSKLNQAKGWLRDPSASPGDAGEQAIRQILDEAGKVGELCAGKERREILGTCKMLGQMTDQVADLRARGQGSSPVAMQKAQQVSQGLDVLTAKVENAARKLEAMTNSKQSIAKKIDAAQNWLADPNGGPEGEEQIRGALAEARKIAELCDDPKERDDILRSLGEISALTSKLADLRRQGKGDSPEARALAKQVATALQNLQTKTNRAVANSRPAKAAVHLEGKIEQAQRWIDNPTVDDRGVGQAAIRGLVAEGHRLANVMMGPYRQDLLAKCDRVDQLTAQLADLAARGEGESPQARALASQLQDSLKDLKARMQEAMTQEVSDVFSDTTTPIKLLAVAATAPPDAPNREEVFDERAANFENHSGKLGATAEKAAAVGTANKSTVEGIQASVKTARELTPQVVSAARILLRNPGNQAAYEHFETMKNQWIDNVEKMTGLVDEAIDTKSLLDASEEAIKKDLDKCKVAMANIQPQMLVAGATSIARRANRILLVAKREVENSEDPKFREAVKAASDELSKTISPMVMDAKAVAGNISDPGLQKSFLDSGYRILGAVAKVREAFQPQEPDFPPPPPDLEQLRLTDELAPPKPPLPEGEVPPPRPPPPEEKDEEFPEQKAGEVINQPMMMAARQLHDEARKWSSKGNDIIAAAKRMALLMAEMSRLVRGGSGTKRALIQCAKDIAKASDEVTRLAKEVAKQCTDKRIRTNLLQVCERIPTISTQLKILSTVKATMLGRTNISDEESEQATEMLVHNAQNLMQSVKETVREAEAASIKIRTDAGFTLRWVRKTPWYQ

SEQ ID NO: 802 - DNA, 5137 bp, Homo sapiens
gcacagtctgtctcttcgccggttcccggccccgtggatcctacttctctgtcgcccgcggttcgccgccccgctcgccgccgcgatgccagtgtttcatacgcgcacgatcgagagcatcctggagccggtggcacagcagatctcccacctggtgataatgcacgaggagggcgaggtggacggcaaagccattcctgacctcaccgcgcccgtggccgccgtgcaggcggccgtcagcaacctcgtccgggttggaaaagagactgttcaaaccactgaggatcagattttgaagagagatatgccaccagcatttattaaggttgagaatgcttgcaccaagcttgtccaggcagctcagatgcttcagtcagacccttactcagtgcctgctcgagattatctaattgatgggtcaaggggcatcctctctggaacatcagacctgctccttaccttcgatgaggctgaggtccgtaaaattattagagtttgcaaaggaattttggaatatcttacagtggcagaggtggtggagactatggaagatttggtcacttacacaaagaatcttgggccaggaatgactaagatggccaagatgattgacgagagacagcaggagctcactcaccaggagcaccgagtgatgttggtgaactcgatgaacaccgtgaaagagttgctgccagttctcatttcagctatgaagatttttgtaacaactaaaaactcaaaaaaccaaggcatagaggaagctttaaaaaatcgcaattttactgtagaaaaaatgagtgctgaaattaatgagataattcgtgtgttacaactcacctcttgggatgaagatgcctgggccagcaaggacactgaagccatgaagagagcattggcctccatagactccaaactgaaccaggccaaaggttggctccgtgaccctagtgcctccccaggggatgctggtgagcaggccatcagacagatcttagatgaagctggaaaagttggtgaactctgtgcaggcaaagaacgcagggagattctgggaacttgcaaaatgctagggcagatgactgatcaagtggctgacctccgtgccagaggacaaggatcctcaccggtggccatgcagaaagctcagcaggtatctcagggtctggatgtgctcacagcaaaagtggaaaatgcagctcgcaagctggaagccatgaccaactcaaagcagagcattgcaaagaagatcgatgctgctcagaactggcttgcagatccaaatggtggaccggaaggagaagagcagattcgaggtgctttggctgaagctcggaaaatagcagaattatgtgatgatcctaaagaaagagatgacattctacgttcccttggggaaatatctgctctgacttctaaattagcagatctacgaagacaggggaaaggagattctccagaggctcgagccttggccaaacaggtggccacggccctgcagaacctgcagaccaaaaccaaccgggctgtggccaacagcagaccggccaaagcagctgtacaccttgagggcaagattgagcaagcacagcggtggattgataatcccacagtggatgaccgtggagtcggtcaggctgccatccgggggcttgtggccgaagggcatcgtctggctaatgttatgatggggccttatcggcaagatcttctcgccaagtgtgaccgagtggaccagctgacagcccagctggctgacctggctgccagaggggaaggggagagtcctcaggcacgagcacttgcatctcagctccaagactccttaaaggatctaaaagctcggatgcaggaggccatgactcaggaagtgtcagatgttttcagcgataccacaactcccatcaagctgttggcagtggcagccacggcgcctcctgatgcgcctaacagggaagaggtatttgatgagagggcagctaactttgaaaaccattcaggaaagcttggtgctacggccgagaaggcggctgcggttggtactgctaataaatcaacagtggaaggcattcaggcctcagtgaagacggcccgagaactcacaccccaggtggtctcggctgctcgtatcttacttaggaaccctggaaatcaagctgcttatgaacattttgagaccatgaagaaccagtggatcgataatgttgaaaaaatgacagggctggtggacgaagccattgataccaaatctctgttggatgcttcagaagaagcaattaaaaaagacctggacaagtgcaaggtagctatggccaacattcagcctcagatgctggttgctggggcaaccagtattgctcgtcgggccaaccggatcctgctggtggctaagagggaggtggagaattccgaggatcccaagttccgtgaggctgtgaaagctgcctctgatgaattgagcaaaaccatctccccaatggtgatggatgcaaaagctgtggctggaaacatttccgaccctggactgcaaaagagcttcctggactcaggatatcggatcctgggagctgtggccaaggtcagagaagccttccaacctcaggagcctgacttcccgccgcctccaccagaccttgaacaactccgactaacagatgagcttgctcctcccaaaccacctctgcctgaaggtgaggtccctccacctaggcctccaccaccagaggaaaaggatgaagagttccctgagcagaaggccggggaggtgattaaccagccaatgatgatggctgccagacagctccatgatgaagctcgcaaatggtccagcaagggcaatgacatcattgcagcagccaagcgcatggctctgctgatggctgagatgtctcggctggtaagagggggcagtggtaccaagcgggcactcattcagtgtgccaaggacatcgccaaggcctcagatgaggtgactcggttggccaaggaggttgccaagcagtgcacagataaacggattagaaccaacctcttacaggtatgtgagcgaatcccaaccataagcacccagctcaaaatcctgtccacagtgaaggccaccatgctgggccggaccaacatcagtgatgaggagtctgagcaggccacagagatgctggttcacaatgcccagaacctcatgcagtctgtgaaggagactgtgcgggaagctgaagctgcttcaatcaaaattcgaacagatgctggatttacactgcgctgggttagaaagactccctggtaccagtaggcacctggctgagcctggctggcacagaaacctctactaaaaagaaggaaaatgatctgagtcccaggagctgcccagagttgctgggagctgaaaaatcacatcctggcctggcacatcagaaaggaatgggggcctcttcaaattagaagacatttatactcttttttcatggacactttgaaatgtgtttctgtataaagcctgtattctcaaacacagttacacttgtgcaccctctatcccaataggcagactgggtttctagcccatggacttcacataagctcagaatccaagtgaacactagccagacactctgctctgcccttgttccctaggggacacttccctctgtttctctttccttggctcccattcactcttccagaatcccaagacccagggcccaggcaaatcagttactaagaagaaaattgctgtgcctcccaaaattgttttgagctttccatgttgctgccaaccataccttccttccctgggctgtgctacctgggtccttttcagaagtgagctttgctgctacaggggaaggtggcctctgtggagccccagcatatgggggcctggattcatttcctgcccttcctcagtttaatccttctagtttcccacaatataaaactgtacttcactgtcaggaagaaatcacagaatcatatgattctgcttttaccatgcccctgagcaatgtctgtgctagggaaactccccgtcccatatcctgcctcagcccgccaaggtagccatcccatgaacacactgtgtcctggtgctctctgccactggaagggcagagtagccagggtgtggccctgccatcttcccagcagggccactcccggcactccatgcttagtcactgcctgcagaggtctgtgctgaggccttatcattcattcttagctcttaattgttcattttgagctgaaatgctgcattttaattttaaccaaaacatgtctcctatatcctggtttttgtagccttcctccacatcctttctaaacaagattttaaagacatgtaggtgtttgttcatctgtaactctaaaagatcctttttaaattcagtcctaagaaagaggagtgcttgtcccctaagagtgtttaatggcaaggcagccctgtctgaaggacacttcctgcctaagggagagtggtatttgcagactagaattctagtgctgctgaagatgaatcaatgggaaatactactcctgtaattcctacctccctgcaaccaactacaaccaagctctctgcatctactcccaagtatggggttcaagagagtaatgggtttcatatttcttatcaccacagtaagttcctactaggcaaaatgagagggcagtgtttcctttttggtacttattactgctaagtatttcccagcacatgaaaccttattttttccaaagccagaaccagatgagtaaaggagtaagaaccttgcctgaacatccttccttcccacccatcgctgtgtgttagttcccaacatcgaatgtgtacaacttaagttggtcctttacactcaggctttcactatttcctttaaaatgaggatgattattttcaaggccctcagcatatttgtatagttgcttgcctgatataaatgcaatattaatgcctttaaagtatgaatctatgccaaagatcacttgttgttttactaaagaaagattacttagaggaaataagaaaaatcatgtttgctctcccggttcttccagtggtttgagacactggtttacactttatgccggatgtgcttttctccaatatcagtgctcgagacacagtgaagcaaattaaaaaaaa

SEQ ID NO: 803 - protein, 535 aa, Homo sapiens
MKLWVSALLMAWFGVLSCVQAEFFTSIGHMTDLIYAEKELVQSLKEYILVEEAKLSKIKSWANKMEALTSKSAADAEGYLAHPVNAYKLVKRLNTDWPALEDLVLQDSAAGFIANLSVQRQFFPTDEDEIGAAKALMRLQDTYRLDPGTISRGELPGTKYQAMLSVDDCFGMGRSAYNEGDYYHTVLWMEQVLKQLDAGEEATTTKSQVLDYLSYAVFQLGDLHRALELTRRLLSLDPSHERAGGNLRYFEQLLEEEREKTLTNQTEAELATPEGIYERPVDYLPERDVYESLCRGEGVKLTPRRQKRLFCRYHHGNRAPQLLIAPFKEEDEWDSPHIVRYYDVMSDEEIERIKEIAKPKLARATVRDPKTGVLTVASYRVSKSSWLEEDDDPVVARVNRRMQHITGLTVKTAELLQVANYGVGGQYEPHFDFSRNDERDTFKHLGTGNRVATFLNYMSDVEAGGATVFPDLGAAIWPKKGTAVFWYNLLRSGEGDYRTRHAACPVLVGCKWVSNKWFHERGQEFLRPCGSTEVD

SEQ ID NO: 804 - DNA, 2194 bp, Homo sapiens
ggggaaggaacactgtaggggatagctgtccacggacgctgtctacaagaccctggagtgagataacgtgcctggtactgtgccctgcatgtgtaagatgcccagttgaccttcgcagcaggagcctggatcaggcacttcctgcctcaggtattgctggacagcccagacacttccctctgtgaccatgaaactctgggtgtctgcattgctgatggcctggtttggtgtcctgagctgtgtgcaggccgaattcttcacctctattgggcacatgactgacctgatttatgcagagaaagagctggtgcagtctctgaaagagtacatccttgtggaggaagccaagctttccaagattaagagctgggccaacaaaatggaagccttgactagcaagtcagctgctgatgctgagggctacctggctcaccctgtgaatgcctacaaactggtgaagcggctaaacacagactggcctgcgctggaggaccttgtcctgcaggactcagctgcaggttttatcgccaacctctctgtgcagcggcagttcttccccactgatgaggacgagataggagctgccaaagccctgatgagacttcaggacacatacaggctggacccaggcacaatttccagaggggaacttccaggaaccaagtaccaggcaatgctgagtgtggatgactgctttgggatgggccgctcggcctacaatgaaggggactattatcatacggtgttgtggatggagcaggtgctaaagcagcttgatgccggggaggaggccaccacaaccaagtcacaggtgctggactacctcagctatgctgtcttccagttgggtgatctgcaccgtgccctggagctcacccgccgcctgctctcccttgacccaagccacgaacgagctggagggaatctgcggtactttgagcagttattggaggaagagagagaaaaaacgttaacaaatcagacagaagctgagctagcaaccccagaaggcatctatgagaggcctgtggactacctgcctgagagggatgtttacgagagcctctgtcgtggggagggtgtcaaactgacaccccgtagacagaagaggcttttctgtaggtaccaccatggcaacagggccccacagctgctcattgcccccttcaaagaggaggacgagtgggacagcccgcacatcgtcaggtactacgatgtcatgtctgatgaggaaatcgagaggatcaaggagatcgcaaaacctaaacttgcacgagccaccgttcgtgatcccaagacaggagtcctcactgtcgccagctaccgggtttccaaaagctcctggctagaggaagatgatgaccctgttgtggcccgagtaaatcgtcggatgcagcatatcacagggttaacagtaaagactgcagaattgttacaggttgcaaattatggagtgggaggacagtatgaaccgcacttcgacttctctaggaatgatgagcgagatactttcaagcatttagggacggggaatcgtgtggctactttcttaaactacatgagtgatgtagaagctggtggtgccaccgtcttccctgatctgggggctgcaatttggcctaagaagggtacagctgtgttctggtacaacctcttgcggagcggggaaggtgactaccgaacaagacatgctgcctgccctgtgcttgtgggctgcaagtgggtctccaataagtggttccatgaacgaggacaggagttcttgagaccttgtggatcaacagaagttgactgacatccttttctgtccttccccttcctggtccttcagcccatgtcaacgtgacagacacctttgtatgttccttgtatgttcctatcaggctgatttttggagaaatgaatgtttgtctggagcagagggagaccatactagggcgactcctgtgtgactgaagtcccagcccttccattcagcctgtgccatccctggccccaaggctaggatcaaagtggctgcagcagagttagctgtctagcgcctagcaaggtgcctttgtacctcaggtgttttaggtgtgagatgtttcagtgaaccaaagttctgataccttgtttacatgtttgtttttatggcatttctatctattgtggctttaccaaaaaataaaatgtccctaccagaagccttaaa

SEQ ID NO: 805 - protein, 270 aa, Homo sapiens
MADHMMAMNHGRFPDGTNGLHHHPAHRMGMGQFPSPHHHQQQQPQHAFNALMGEHIHYGAGNMNATSGIRHAMGPGTVNGGHPPSALAPAARFNNSQFMGPPVASQGGSLPASMQLQKLNNQYFNHHPYPHNHYMPDLHPAAGHQMNGTNQHFRDCNPKHSGGSSTPGGSGGSSTPGGSGSSSGGGAGSSNSGGGSGSGNMPASVAHVPAAMLPPNVIDTDFIDEEVLMSLVIEMGLDRIKELPELWLGQNEFDFMTDFVCKQQPSRVSC

SEQ ID NO: 806 - DNA, 1903 bp, Homo sapiens
gggcaacggaggggaaataaaagggaacggctccgaatctgccccagcggccgctgcgagacctcggcgccgacatcgcgacagcgaagcgctttgcacgccaggaaggtcccctctatgtgctgctgagccggtcctggacgcgacgagcccgccctcggtcttcggagcagaattcgcaaaaacggaaggactggaaatggcagaccatatgatggcaatgaaccacgggcgcttccccgacggcaccaatgggctgcaccatcaccctgcccaccgcatgggcatggggcagttcccgagcccccatcaccaccagcagcagcagccccagcacgccttcaacgccctaatgggcgagcacatacactacggcgcgggcaacatgaatgccacgagcggcatcaggcatgcgatggggccggggactgtgaacggagggcaccccccgagcgcgctggcccccgcggccaggtttaacaactcccagttcatgggtcccccggtggccagccagggaggctccctgccggccagcatgcagctgcagaagctcaacaaccagtatttcaaccatcacccctacccccacaaccactacatgccggatttgcaccctgctgcaggccaccagatgaacgggacaaaccagcacttccgagattgcaaccccaagcacagcggcggcagcagcacccccggcggctcgggcggcagcagcacccccggcggctctggcagcagctcgggcggcggcgcgggcagcagcaacagcggcggcggcagcggcagcggcaacatgcccgcctccgtggcccacgtccccgctgcaatgctgccgcccaatgtcatagacactgatttcatcgacgaggaagttcttatgtccttggtgatagaaatgggtttggaccgcatcaaggagctgcccgaactctggctggggcaaaacgagtttgattttatgacggacttcgtgtgcaaacagcagcccagcagagtgagctgttgactcgatcgaaaccccggcgaaagaaatcaaacccccaacttcttcggcgtgaattaaaagaaacattcccttagacacagtatctcacttttcagatcttgaaaggtttgagaacttggaaacaaagtaaactataaacttgtacaaattggttttaaaaaaaattgctgccactttttttcctgtttttgtttcgtttttgtagccttgacattcacccacctcccttatgtagttgaaatatctagctaacttggtctttttcgttgtttgtttttactcctttccctcactttctccagtgctcaactgttagatattaatcttggcaaactgcttaatcttgtggattttgtagatggtttcaaatgactgaactgcattcagatttacgagtgaaaggaaaaattgcattagttggttgcatgaacttcgaagggcagatattactgcacaaactgccatctcgcttcatttttttaactatgcatttgagtacagactaatttttaaaatatgctaaactggaagattaaacagatgtgggccaaactgttctggatcaggaaagtcatactgttcactttcaagttggctgtcccccccgccgccccccccacccccatatgtacagatgataatagggtgtggaatgtcgtcagtggcaaacatttcacagatttttattttgtttctgtcttcaacatttttgacactgtgctaatagttatattcagtacatgaaaagatactactgtgttgaaagctttttaggaaattttgacagtatttttgtacaaaacatttttttgaaaaaatacttgttaatttattctattttaatttgccaatgtcaataaaaagttaagaaaaaaaaaaaaaaaaaaaaaa

SEQ ID NO: 807 - protein, 152 aa, Homo sapiens
MAVLSKEYGFVLLTGAASFIMVAHLAINVSKARKKYKVEYPIMYSTDPENGHIFNCIQRAHQNTLEVYPPFLFFLAVGGVYHPRIASGLGLAWIVGRVLYAYGYYTGEPSKRSRGALGSIALLGLVGTTVCSAFQHLGWVKSGLGSGPKCCH

SEQ ID NO: 808 - DNA, 683 bp, Homo sapiens
cgccccaggcgagggcgccgcacccacaccgcgctgcgcagttttgttctgctccagctgttcgaaggtgatccagacgcaagatggctgtcctctctaaggaatatggttttgtgcttctaactggtgctgccagctttataatggtggcccacctagccatcaatgtttccaaggcccgcaagaagtacaaagtggagtatcctatcatgtacagcacggaccctgaaaatgggcacatcttcaactgcattcagcgagcccaccagaacacgttggaagtgtatcctcccttcttattttttctagctgttggaggtgtttaccacccgcgtatagcttctggcctgggcttggcctggattgttggacgagttctttatgcttatggctattacacgggagaacccagcaagcgtagtcgaggagccctggggtccatcgccctcctgggcttggtgggcacaactgtgtgctctgctttccagcatcttggttgggttaaaagtggcttgggcagtggacccaaatgctgccattaaagaattataggggtttaaaaactctcattcattttaaatgacttacctttatttccagttacattttttttctaaatataataaaaacttacctggcatcagcctcatacctaaaaaaaaaaaaaaaaaaaaaaaaaaaaa

SEQ ID NO: 809 - protein, 188 aa, Homo sapiens
MDVNIAPLRAWDDFFPGSDRFARPDFRDISKWNNRVVSNLLYYQTNYLVVAAMMISIVGFLSPFNMILGGIVVVLVFTGFVWAAHNKDVLRRMKKRYPTTFVMVVMLASYFLISMFGGVMVFVFGITFPLLLMFIHASLRLRNLKNKLENKMEGIGLKRTPMGIVLDALEQQEEGINRLTDYISKVKE

SEQ ID NO: 810 - DNA, 2088 bp, Homo sapiens
cgctgtcaactctccaactcagctcagctgatcggttgccgccgccgccgccgccagattctggaggcgaagaacgcaaagctgagaacatggacgttaatatcgccccactccgcgcctgggacgatttcttcccgggttccgatcgctttgcccggccggacttcagggacatttccaaatggaacaaccgcgtagtgagcaacctgctctattaccagaccaactacctggtggtggctgccatgatgatttccattgtggggtttctgagtcccttcaacatgatcctgggaggaatcgtggtggtgctggtgttcacagggtttgtgtgggcagcccacaataaagacgtccttcgccggatgaagaagcgctaccccacgacgttcgttatggtggtcatgttggcgagctatttccttatctccatgtttggaggagtcatggtctttgtgtttggcattacttttcctttgctgttgatgtttatccatgcatcgttgagacttcggaacctcaagaacaaactggagaataaaatggaaggaataggtttgaagaggacaccgatgggcattgtcctggatgccctagaacagcaggaagaaggcatcaacagactcactgactatatcagcaaagtgaaggaataaacataacttacctgagctagggttgcagcagaaattgagttgcagcttgcccttgtccagacctatgttctgcttgcgtttttgaaacaggaggtgcacgtaccacccaattatctatggcagcatgcatgtataggccgaactattatcagctctgatgtttcagagagaagacctcagaaaccgaaagaaaaccaccaccctcctattgtgtctgaagtttcacgtgtgtttatgaaatctaatgggaaatggatcacacgatttctttaagggaattaaaaaaaataaaagaattacggcttttacagcaacaatacgattatcttataggaaaaaaaaaaatcattgtaaagtatcaagacaatacgagtaaatgaaaaggctgttaaagtagatgacatcatgtgttagcctgttcctaaatccctagaattgtaatgtgtgggatataaattagtttttattattctcttaaaaatcaaagatgatctctatcactttgccacctgtttgatgtgcagtggaaactggttaagccagttgttcatacttcctttacaaatataaagatagctgtttaggatattttgttacatttttgtaaatttttgaaatgctagtaatgtgttttcaccagcaagtatttgttgcaaacttaatgtcattttccttaagatggttacagctatgtaacctgtattattctggacggacttattaaaatacaaacagacaaaaaataaaacaaaacttgagttctatttaccttgcacattttttgttgttacagtgaaaaaaatggtccaagaaaatgtttgccatttttgcattgtttcgtttttaactggaacatttagaaagaaggaaatgaatgtgcattttattaattccttaggggcacaaggaggacaataatagctgatcttttgaaatttgaaaaacgtctttagatgaccaagcaaaaagactttaaaaaatggtaatgaaaatggaatgcagctactgcagctaataaaaaattttagatagcaattgttacaaccatatgcctttatagctagacattagaattatgatagcatgagtttatacattctattatttttcctccctttctcatgtttttataaataggtaataaaaaatgttttgcctgccaattgaatgatttcgtagctgaagtagaaacatttaggtttctgtagcattaaattgtgaagacaactggagtggtacttactgaagaaactctctgtatgtcctagaataagaagcaatgatgtgctgcttctgatttttcttgcattttaaattctcagccaacctacagccatgatctttagcacagtgatatcaccatgacttcacagacatggtctagaatctgtacccttacccacatatgaagaataaaattgattaaaggtta

SEQ ID NO: 811 - protein, 165 aa, Homo sapiens; identical to SEQ ID NO: 739

SEQ ID NO: 812 - DNA, 634 bp, Homo sapiens; identical to SEQ ID NO: 740

SEQ ID NO: 813 - protein, 582 aa, Homo sapiens
MSPAPRPPRCLLLPLLTLGTALASLGSAQSSSFSPEAWLQQYGYLPPGDLRTHTQRSPQSLSAAIAAMQKFYGLQVTGKADADTMKAMRRPRCGVPDKFGAEIKANVRRKRYAIQGLKWQHNEITFCIQNYTPKVGEYATYEAIRKAFRVWESATPLRFREVPYAYIREGHEKQADIMIFFAEGFHGDSTPFDGEGGFLAHAYFPGPNIGGDTHFDSAEPWTVRNEDLNGNDIFLVAVHELGHALGLEHSSDPSAIMAPFYQWMDTENFVLPDDDRRGIQQLYGGESGFPTKMPPQPRTTSRPSVPDKPKNPTYGPNICDGNFDTVAMLRGEMFVFKERWFWRVRNNQVMDGYPMPIGQFWRGLPASINTAYERKDGKFVFFKGDKHWVFDEASLEPGYPKHIKELGRGLPTDKIDAALFWMPNGKTYFFRGNKYYRFNEELRAVDSEYPKNIKVWEGIPESPRGSFMGSDEVFTYFYKGNKYWKFNNQKLKVEPGYPKSALRDWMGCPSGGRPDEGTEEETEVIIIEVDEEGGGAVSAAAVVLPVLLLLLVLAVGLAVFFFRRHGTPRRLLYCQRSLLDKV

SEQ ID NO: 814 - DNA, 3558 bp, Homo sapiens
cagaccccagttcgccgactaagcagaagaaagatcaaaaaccggaaaagaggagaagagcaaacaggcactttgaggaacaatcccctttaactccaagccgacagcggtctaggaattcaagttcagtgcctaccgaagacaaaggcgccccgagggagtggcggtgcgaccccagggcgtgggcccggccgcggagcccacactgcccggctgacccggtggtctcggaccatgtctcccgccccaagacccccccgttgtctcctgctccccctgctcacgctcggcaccgcgctcgcctccctcggctcggcccaaagcagcagcttcagccccgaagcctggctacagcaatatggctacctgcctcccggggacctacgtacccacacacagcgctcaccccagtcactctcagcggccatcgctgccatgcagaagttttacggcttgcaagtaacaggcaaagctgatgcagacaccatgaaggccatgaggcgcccccgatgtggtgttccagacaagtttggggctgagatcaaggccaatgttcgaaggaagcgctacgccatccagggtctcaaatggcaacataatgaaatcactttctgcatccagaattacacccccaaggtgggcgagtatgccacatacgaggccattcgcaaggcgttccgcgtgtgggagagtgccacaccactgcgcttccgcgaggtgccctatgcctacatccgtgagggccatgagaagcaggccgacatcatgatcttctttgccgagggcttccatggcgacagcacgcccttcgatggtgagggcggcttcctggcccatgcctacttcccaggccccaacattggaggagacacccactttgactctgccgagccttggactgtcaggaatgaggatctgaatggaaatgacatcttcctggtggctgtgcacgagctgggccatgccctggggctcgagcattccagtgacccctcggccatcatggcacccttttaccagtggatggacacggagaattttgtgctgcccgatgatgaccgccggggcatccagcaactttatgggggtgagtcagggttccccaccaagatgccccctcaacccaggactacctcccggccttctgttcctgataaacccaaaaaccccacctatgggcccaacatctgtgacgggaactttgacaccgtggccatgctccgaggggagatgtttgtcttcaaggagcgctggttctggcgggtgaggaataaccaagtgatggatggatacccaatgcccattggccagttctggcggggcctgcctgcgtccatcaacactgcctacgagaggaaggatggcaaattcgtcttcttcaaaggagacaagcattgggtgtttgatgaggcgtccctggaacctggctaccccaagcacattaaggagctgggccgagggctgcctaccgacaagattgatgctgctctcttctggatgcccaatggaaagacctacttcttccgtggaaacaagtactaccgtttcaacgaagagctcagggcagtggatagcgagtaccccaagaacatcaaagtctgggaagggatccctgagtctcccagagggtcattcatgggcagcgatgaagtcttcacttacttctacaaggggaacaaatactggaaattcaacaaccagaagctgaaggtagaaccgggctaccccaagtcagccctgagggactggatgggctgcccatcgggaggccggccggatgaggggactgaggaggagacggaggtgatcatcattgaggtggacgaggagggcggcggggcggtgagcgcggctgccgtggtgctgcccgtgctgctgctgctcctggtgctggcggtgggccttgcagtcttcttcttcagacgccatgggacccccaggcgactgctctactgccagcgttccctgctggacaaggtctgacgcccaccgccggcccgcccactcctaccacaaggactttgcctctgaaggccagtggcagcaggtggtggtgggtgggctgctcccatcgtcccgagccccctccccgcagcctccttgcttctctctgtcccctggctggcctccttcaccctgaccgcctccctccctcctgccccggcattgcatcttccctagataggtcccctgagggctgagtgggagggcggccctttccagcctctgcccctcaggggaaccctgtagctttgtgtctgtccagccccatctgaatgtgttgggggctctgcacttgaaggcaggaccctcagacctcgctggtaaaggtcaaatggggtcatctgctccttttccatcccctgacataccttaacctctgaactctgacctcaggaggctctgggcactccagccctgaaagccccaggtgtacccaattggcagcctctcactactctttctggctaaaaggaatctaatcttgttgagggtagagaccctgagacagtgtgagggggtggggactgccaagccaccctaagaccttgggaggaaaactcagagagggtcttcgttgctcagtcagtcaagttcctcggagatctgcctctgcctcacctaccccagggaacttccaaggaaggagcctgagccactggggactaagtgggcagaagaaacccttggcagccctgtgcctctcgaatgttagccttggatggggctttcacagttagaagagctgaaaccaggggtgcagctgtcaggtagggtggggccggtgggagaggcccgggtcagagccctgggggtgagcctgaaggccacagagaaagaaccttgcccaaactcaggcagctggggctgaggcccaaaggcagaacagccagagggggcaggaggggaccaaaaaggaaaatgaggacgtgcagcagcattggaaggctggggccgggcaggccaggccaagccaagcagggggccacagggtgggctgtggagctctcaggaagggccctgaggaaggcacacttgctcctgttggtccctgtccttgctgcccaggcagcgtggaggggaagggtagggcagccagagaaaggagcagagaaggcacacaaacgaggaatgaggggcttcacgagaggccacagggcctggctggccacgctgtcccggcctgctcaccatctcagtgaggggcaggagctggggctcgcttaggctgggtccacgcttccctggtgccagcacccctcaagcctgtctcaccagtggcctgccctctcgctcccccacccagcccacccattgaagtctccttgggccaccaaaggtggtggccatggtaccggggacttgggagagtgagacccagtggagggagcaagaggagagggatgtcgggggggtggggcacggggtaggggaaatggggtgaacggtgctggcagttcggctagatttctgtcttgtttgtttttttgttttgtttaatgtatatttttattataattattatatatgaattccaaaaaaaaaaaaaaaaaaaaa

SEQ ID NO: 815 - protein, 529 aa, Homo sapiens
MSQDTEVDMKEVELNELEPEKQPMNAASGAAMSLAGAEKNGLVKIKVAEDEAEAAAAAKFTGLSKEELLKVAGSPGWVRTRWALLLLFWLGWLGMLAGAVVIIVRAPRCRELPAQKWWHTGALYRIGDLQAFQGHGAGNLAGLKGRLDYLSSLKVKGLVLGPIHKNQKDDVAQTDLLQIDPNFGSKEDFDSLLQSAKKKSIRVILDLTPNYRGENSWFSTQVDTVATKVKDALEFWLQAGVDGFQVRDIENLKDASSFLAEWQNITKGFSEDRLLIAGTNSSDLQQILSLLESNKDLLLTSSYLSDSGSTGEHTKSLVTQYLNATGNRWCSWSLSQARLLTSFLPAQLLRLYQLMLFTLPGTPVFSYGDEIGLDAAALPGQPMEAPVMLWDESSFPDIPGAVSANMTVKGQSEDPGSLLSLFRRLSDQRSKERSLLHGDFHAFSAGPGLFSYIRHWDQNERFLVVLNFGDVGLSAGLQASDLPASASLPAKADLLLSTQPGREEGSPLELERLKLEPHEGLLLRFPYAA

SEQ ID NO: 816 - DNA, 2188 bp, Homo sapiens
ggcacgaggaccgaccgcattgcggcttggttttctcacccagtgcatgtggcaggagcggtgagatcactgcctcacggcgatcctggactgacggtcacgactgcctaccctctaaccctgttctgagctgccccttgcccacacaccccaaacctgtgtgcaggatccgcctccatggagctacagcctcctgaagcctcgatcgccgtcgtgtcgattccgcgccagttgcctggctcacattcggaggctggtgtccagggtctcagcgcgggggacgactcagagttggggtctcactgtgttgcccagactggtctcgaactcttggcctcaggtgatcctcttccctcagcttcccagaatgccgagatgatagagacggggtctgactgtgttacccaggctggtcttcaactcttggcctcaagtgatcctcctgccttagcttccaagaatgctgaggttacaggcaccatgagccaggacaccgaggtggatatgaaggaggtggagctgaatgagttagagcccgagaagcagccgatgaacgcggcgtctggggcggccatgtccctggcgggagccgagaagaatggtctggtgaagatcaaggtggcggaagacgaggcggaggcggcagccgcggctaagttcacgggcctgtccaaggaggagctgctgaaggtggcaggcagccccggctgggtacgcacccgctgggcactgctgctgctcttctggctcggctggctcggcatgcttgctggtgccgtggtcataatcgtgcgagcgccgcgttgtcgcgagctaccggcgcagaagtggtggcacacgggcgccctctaccgcatcggcgaccttcaggccttccagggccacggcgcgggcaacctggcgggtctgaaggggcgtctcgattacctgagctctctgaaggtgaagggccttgtgctgggtccaattcacaagaaccagaaggatgatgtcgctcagactgacttgctgcagatcgaccccaattttggctccaaggaagattttgacagtctcttgcaatcggctaaaaaaaagagcatccgtgtcattctggaccttactcccaactaccggggtgagaactcgtggttctccactcaggttgacactgtggccaccaaggtgaaggatgctctggagttttggctgcaagctggcgtggatgggttccaggttcgggacatagagaatctgaaggatgcatcctcattcttggctgagtggcaaaatatcaccaagggcttcagtgaagacaggctcttgattgcggggactaactcctccgaccttcagcagatcctgagcctactcgaatccaacaaagacttgctgttgactagctcatacctgtctgattctggttctactggggagcatacaaaatccctagtcacacagtatttgaatgccactggcaatcgctggtgcagctggagtttgtctcaggcaaggctcctgacttccttcttgccggctcaacttctccgactctaccagctgatgctcttcaccctgccagggacccctgttttcagctacggggatgagattggcctggatgcagctgcccttcctggacagcctatggaggctccagtcatgctgtgggatgagtccagcttccctgacatcccaggggctgtaagtgccaacatgactgtgaagggccagagtgaagaccctggctccctcctttccttgttccggcggctgagtgaccagcggagtaaggagcgctccctactgcatggggacttccacgcgttctccgctgggcctggactcttctcctatatccgccactgggaccagaatgagcgttttctggtagtgcttaactttggggatgtgggcctctcggctggactgcaggcctccgacctgcctgccagcgccagcctgccagccaaggctgacctcctgctcagcacccagccaggccgtgaggagggctcccctcttgagctggaacgcctgaaactggagcctcacgaagggctgctgctccgcttcccctacgcggcctgacttcagcctgacatggacccactacccttctcctttccttcccaggccctttggcttctgatttttctcttttttaaaaacaaacaaacaaactgttgcaaaaaaaaaaaaaaaaaaa

SEQ ID NO: 817 - protein, 68 aa, Homo sapiens
MDPETCPCPSGGSCTCADSCKCEGCKCTSCKKSCCSCCPAECEKCAKDCVCKGGEAAEAEAEKCSCCQ

SEQ ID NO: 818 - DNA, 400 bp, Homo sapiens
ccactagccaagccgcgcgtccagttgcttgaagaagcccgttcaccgcctccagctgctgctctcctcgacatggaccctgagacctgcccctgcccttctggtggctcctgcacctgcgcggactcctgcaagtgcgagggatgcaaatgcacctcctgcaagaagagctgctgctcctgctgccctgcggagtgtgagaagtgtgccaaggactgtgtgtgcaaaggcggagaggcagctgaggcagaagcagagaagtgcagctgctgccagtgaaggcacccctccgtgtggagcactggagatagtgccaggtggctcagtgcccacctatgccctgtggtgaagtgttcctggtgttccctttccctgctgaccttggaggaatgacaataaa

SEQ ID NO: 819 - protein, 76 aa, Homo sapiens
MTDVETTYADFIASGRTGRRNAIHDILVSSASGNSNELALKLAGLDINKTEGEEDAQRSSTEQSGEAQGEAAKSES

SEQ ID NO: 820 - DNA, 2147 bp, Homo sapiens
gaattccgcgctttgcagagaaagcccccctggctcttctctctcaatccataatccagcgatgctgcagctgtaaaagcattaatagaaaatcaatccacaacctcgcggggcagcgatcgtcgagcgccgtttccaggctgccttccctggggtcgggagcggccccgctccccccgtggctggcgcgaaatgtggtgatccgtcccggggcggggatgacttcatgcagccggagctccgcggcgggagcggaggctgctgctggcaggtggggcgcgggccggcgcgagctgaccgagcactcggcgggcgcggcgggactgcggcccgtggcggcgtgcgcgggacctgcgctgactaggtccggggaagtttcctgactttctgagaagccctggtttccccaaagaagtgacttttctgatagaaatctgaaggtcatctccaagaaaaaagagatctagtatagtcaatgaattaaagacaagaaggtttccaatcagtccctgctatgtggatatttggtagcaatgactgatgtggaaactacatatgcagattttattgcttcaggaagaacaggtagaagaaatgcaatacatgatatcctggtttcctctgcaagtggcaacagcaatgaattagccttgaaattagcaggtcttgatatcaacaagacagaaggtgaagaagatgcacaacgaagttctacagaacaaagtggggaagcccagggagaagcagcaaaatctgaaagctaacaccccactttgaccctcgaccacacctgaaaatgtctcaaatctccaggagtatctggaatgcatttgtttccatgagtgaaaagaggaaaaagaaaatggctgtgctgcattgcaggaacctgctcattatcatgttaaaaatgagggcagaggctgtggctgcaggcagacttttccctacctctgtcattagcaatggttgaaatcatgtggcttgtgtttgggcgtcatttttgtatggatcctttcacttgatcatatgacgaaatgcttatagagagtagctccgacctagatgatgattcttcctgtagcatctggcccctcacaatgtcagaggatttaattgtgtctaattgcgaagggttgattgaaccccagagtttaaatatctctggctcaagtgttcacccagtaaaagaaagatccagaaagcactgtttttagcattacgtatctgtgtgttactgctgtgttatttacactgttttgtattgtacaatatatatgctcagcactgccccctctctgattgcttatgaaaacaaaatgatgtacattactgtgaatttttataccactcatttttaaaagggctgtcttttcattttagttttccatactgtggtggtgtacacaggatagaacacccttttttaaaacacagtctttccccttgctcattgtatgttgatgagttgattaagtctaacagattcatcaagactccattgctttattatagagacatttgaaaatatccattaatgtgaatatcacctgaattcaatctgtcaaatttgttttattctcaagtggagaacttctcccacataatatatatatatatatatattttaatttatgagaattttggacaattggaaaggtagaaaagaaaagccaagatcatactaaggactggaaatattttgttctatggaatcaaatttctcacaatgctgtatgatactatttaaatttggaggacaacttatcttcactaagctgaatcaggtggagaaagtaatctccttgcaatcatgtggacaccaatcacaaaagtaaagccctggtgttgtgttttcatgtcttttttcagccctctcagatccaaatgttattatgcactttttaatgtttgtaaacttttactaataattagtgtgaattgcattctgatacaataatgattatcattagaagctaacaaaattctcattaatactgtgtttgatggcctctgctgtgttttaacatcgtgcttcttatatggaaagtttttgtgagctgtgtaatccctctggtcagtattatgaaatcatttgtcagtggtaataaataaggaaccagtaaaaaaaaaaaaaaaaaaaggaattc

SEQ ID NO: 821 - protein, 331 aa, Homo sapiens
MARGGRGRRLGLALGLLLALVLAPRVLRAKPTVRKERVVRPDSELGERPPEDNQSFQYDHEAFLGKEDSKTFDQLTPDESKERLGKIVDRIDNDGDGFVTTEELKTWIKRVQKRYIFDNVAKVWKDYDRDKDDKISWEEYKQATYGYYLGNPAEFHDSSDHHTFKKMLPRDERRFKAADLNGDLTATREEFTAFLHPEEFEHMKEIVVLETLEDIDKNGDGFVDQDEYIADMFSHEENGPEPDWVLSEREQFNEFRDLNKDGKLDKDEIRHWILPQDYDHAQAEARHLVYESDKNKDEKLTKEEILENWNMFVGSQATNYGEDLTKNHDEL

SEQ ID NO: 822 - DNA, 2104 bp, Homo sapiens
gctgttgtcgctcgctcagcgtctccctctcggccgccctctcctcgggacgatggcgcgcggtggccgcggccgccgcctggggttagccctggggctgctgctggcgctggtgctggcgccgcgggttctgcgggccaagcccacggtgcgcaaagagcgcgtggtgcggcccgactcggagctgggcgagcggccccctgaggacaaccagagcttccagtacgaccacgaggccttcctgggcaaggaggactccaagaccttcgaccagctcaccccggacgagagcaaggagaggctagggaagattgttgatcgaatcgacaatgatggggatggctttgtcactactgaggagctgaaaacctggatcaaacgggtgcagaaaagatacatctttgataatgtcgccaaagtctggaaggattatgatagggacaaggatgataaaatttcctgggaagaatacaaacaagccacctatggttactacctaggaaaccccgcagagtttcatgattcttcagatcatcacacctttaaaaagatgctgccacgtgatgagagaagattcaaagctgcagacctcaatggtgacctgacagctactcgggaggagttcactgcctttctgcatcctgaagagtttgaacatatgaaggaaattgtggttttggaaaccctggaggacatcgacaagaacggggatgggtttgtggatcaggatgagtatattgcggatatgttttcccatgaggagaatggccctgagccagactgggttttatcagaacgggagcagtttaacgaattccgggatctgaacaaggacgggaagttagacaaagatgagattcgccactggatcctccctcaagattatgatcacgcacaggctgaggccaggcatctggtatatgaatcagacaaaaacaaggatgagaagctaactaaagaggaaatattggagaactggaacatgtttgttggaagccaagctaccaattacggggaagatctcacaaaaaatcatgatgagctttgatagacactcaccagaatatggcagactgtcataggcattctgttattgtcttggattgttgctacaattgtctaattacagcagttgtgatcccacaaaaagcaagtttatacctcagattggggtataaaaattgtttttcgctcagtatttactggaaaatggacatcactagtctttcagtaagatttctctcaaaacacgtgaaaaccttggtaaattgcaattctttctggggatatattggtacaacatgacttaaaacttttttttttctattaaaacttaaaggggaacaaaacttgaaaaagccctgttcttcagaaggtgagtgggttgagggaggcagtaatatgaagtgactgctgtgtattttaactaccagatttttatatttgccactgttagatagttggaaaggggaaattctgtttaagcgaaagtggtatcatcctaggtaagcttatttcagaacaagtctaatatatcagattctttcttttcgactttatactctgagttattacttactgtaagtggtgtatatgaaacctccatgcattttccagtatggatctgctaatatgcacagtaaatccatgtctttgtttgtttttctattaagaagcaatcaagaaagataatgtgaaaaagaaaggaatttagaggtagggaaaagatgaatgtcagacatgtgaagaactatagtaaaaatgataaaccacctaaatatccttgaacctaccttaaaatgccaatgaggtaggcctgatctttgaatagtggctaggatacaatgcatttcctcagtgatcactgattagaatgagttggtgggatccttgggaagccaaacggagcggggttctggatcatgtcccatccagtccagtgaatccccgacccgcagacctgccccccccgcaacagcttataccatggaatgaggacaaggtgatactctgagctgtggactgaactggcagacacaacctgtacagattgaaatttcaccttgtaaggaggaagtgaatgaaataaaggatccccctaagg

SEQ ID NO: 823 - protein, 899 aa, Homo sapiens
HARRRSVQTMNYVGQLAGQVFVTVKELYKGLNPATLSGCIDIIVIRQPNGNLQCSPFHVRFGKMGVLRSREKVVDIEINGESVDLHMKLGDNGEAFFVQETDNDQEVIPMHLATSPILSEGASRMECQLKRGSVDRMRGLDPSTPAQVIAPSETPSSSSVVKKRRKRRRKSQLDSLKRDDNMNTSEDEDMFPIEMSSDEAMELLESSRTLPNDIPPFQDDIPEENLSLAVIYPQSASYPNSDREWSPTPSPSGSRPSTPKSDSELVSKSTERTGQKNPEMLWLWGELPQAAKSSSPHKMKESSPLSSRKICDKSHFQAIHSESSDTFSDQSPTLVGGALLDQNKPQTEMQFVNEEDLETLGAAAPLLPMIEELKPPSASVVQTANKTDSPSRKRDKRSRHLGADGVYLDDLTDMDPEVAALYFPKNGDPSGLAKHASDNGARSANQSPQSVGSSGVDSGVESTSDGLRDLPSIAISLCGGLSDHREITKDAFLEQAVSYQQFVDNPAIIDDPNLVVKIGSKYYNWTTAAPLLLAMQAFQKPLPKATVESIMRDKMPKKGGRWWFSWRGRNTTIKEESKPEQCLAGKAHSTGEQPPQLSLATRVKHESSSSDEERAAAKPSNAGHLPLLPNVSYKKTLRLTSEQLKSLKLKNGPNDVVFSVTTQYQGTCRCEGTIYLWNWDDKVIISDIDGTITRSDTLGHILPTLGKDWTHQGIAKLYHKVSQNGYKFLYCSARAIGMADMTRGYLHWVNERGTVLPQGPLLLSPSSLFSALHREVIEKKPEKFKVQCLTDIKNLFFPNTEPFYAAFGNRPADVYSYKQVGVSLNRIFTVNPKGELVQEHAKTNISSYVRLCEVVDHVFPLLKRSHSSDFPCSDTFSNFTFWREPLPPFENQDIHSASA

SEQ ID NO: 824 - DNA, 5307 bp, Homo sapiens
ccacgcgcggcgccgctcggtgcagaccatgaattacgtggggcagttagccggccaggtgtttgtcaccgtgaaggagctctacaaggggctgaatcccgccacactctcagggtgcattgacatcattgtcatccgccagcccaatggaaacctccaatgctcccctttccacgtccgctttgggaagatgggggtcctgcgctcccgagagaaagtggttgacatagaaatcaatggggaatctgtggatttgcatatgaaattgggagataatggagaagcattttttgttcaagaaacagataatgatcaggaagttatccctatgcacctggccacctcccccatcctgtcagaaggagcttcgagaatggaatgccagctgaaaaggggctctgtggacaggatgagaggcctggaccccagcacgccagcccaagtgatcgctcccagcgagacgccgtcaagcagctctgtagtaaagaagagaagaaaaaggaggagaaagtcacagctggacagcctgaagagagatgacaacatgaacacatctgaggatgaggacatgttccccatcgagatgagctcggatgaggccatggagctgctggagagcagcagaactcttcctaatgatatacctccattccaagatgatattcctgaggaaaacctctccctggctgtgatttaccctcagtcagcctcataccctaattcggatagagagtggtcacccactcccagtccttccggttcccgaccttcaacacctaaaagtgattcagaattggtcagcaagtccacggaaaggacagggcagaagaacccagaaatgctttggctgtggggagagctgccgcaggctgctaagtcttcttctccacacaagatgaaagagtccagcccattgagcagtagaaaaatttgtgataaaagtcactttcaggccattcacagcgaatcttcagacacttttagtgaccaatcgccaactctggtcggtggggcacttttggaccagaacaagcctcagacagaaatgcagtttgtgaatgaagaagacctggagaccttaggagcagcagcgccactcttgcccatgatcgaggagctcaaacccccctctgccagtgtagtccagacagcaaacaagacggattctccttccaggaaaagagataaacgaagccgacatcttggtgctgacggcgtctacttggatgacctcacagacatggatcctgaagtggcggccctgtattttcccaaaaacggagatccttccggactcgcaaaacatgcaagcgacaacggagcccggtcagccaaccagtccccgcagtcggtgggcagctcgggcgtggacagtggcgtggagagcacctcggacgggctgagggacctcccttccatcgccatctccctctgcgggggcctcagcgaccaccgggagatcacgaaagatgcattcctggagcaagctgtgtcatatcaacagtttgtggacaaccccgctattatcgatgaccccaatctcgtggtaaagattgggagtaaatattataactggacaacagcagcacccctcctcctggcaatgcaggccttccagaaacctttgccaaaggccactgtggaatctatcatgagggataaaatgcccaaaaagggaggaagatggtggttttcatggaggggaagaaacaccacaatcaaggaggaaagtaagccagagcagtgcttggctggcaaggcccatagcaccggagagcaaccgccgcagctcagcttggccaccagggtaaagcatgaatcatcctccagtgatgaggagcgcgcagctgccaagccatcaaacgcaggccacctccctcttctgcctaatgtcagctacaagaagactctccggctgacttccgagcagcttaaaagcttgaagttgaagaatggccccaacgacgtggttttcagtgtcaccacgcagtaccaaggcacgtgccgctgtgagggcaccatctatctgtggaactgggatgataaagtcatcatttctgatattgatgggacaattaccagatcagatactcttggccacattttgcccacccttgggaaggattggacccatcagggcatcgctaagctgtaccataaagtgagccagaatggatataaatttctctactgttctgcccgtgccatcgggatggcggacatgacgcggggctacctgcactgggtcaacgagaggggcacggtgctgccccaggggcccctgctgctgagtcccagcagcctcttctctgccctgcacagagaagtgattgaaaagaagccagaaaagtttaaagtccagtgtttgacagacatcaaaaacctgtttttccccaacacagaacccttttatgctgcttttggaaaccgaccagctgatgtgtattcatacaagcaagtaggagtgtctttgaatagaatatttaccgtcaaccctaaaggagagctggtacaggaacatgcaaagaccaacatctcttcgtatgtgagactctgtgaagtagtcgaccacgttttcccgttgctgaaaagaagccattcttcagactttccctgttcggataccttcagtaacttcaccttttggagagagccactgccaccttttgaaaaccaggacattcattctgcctcagcgtaaaatgtcccaagcagcctcttgccagcagtgcagagcctggttgtcacccattaaaggataggtctccccggagtgcacagctccacctgggagcctggcgcgtcatcattggcctgacagcagagagaattgagaagcatttctcccctgccccaccccggggctgacatttctaagcaagataggaagggagcactttctaggctaggagttgggtgcatttgtaccgtgaaaagcattcctcagttgtggcttaatgccagttacgacgctgcctttccggcctgctccagcaagtagctactggttcacgtgcagtttggggctgtgaaacctaggcagaaggcggctgtctgagggctgtccccgcctaggacagggtcaatcgaggaatgccagatgtgcacggtttttggcaaagtagggggcacatttccattatagcaatgttagtgccaccaccttctgaacacagtggggagggctgtgaaggctcatgtgacctggatctgaggtctctgatagaaatctggacgccaccgggtccaggcctggcctcagacttggccttgtggatgggccccttacagtatttgctgactagtctcatttttaggtgataagtttttctttaattcctttggttaaagatagtctatttcattggcatatctccccccagtttttgtggctcaaggctggaatatttatgccttaatatatctatggcagacatttaagaatgcgctttatctagctcatggtaactttgcaacgccttagattaaaatgacagtaaatattactaaggcagtattttgaatgagtttgacactgccggcttccttccatccagcgaggtggtgctgacagtgtggacttgagcacacttatgccaaatgataatgatactgacttctgttgggagctctccaaagaaactggttggttttaagaaaatagtttcaagaagttcaactatattcttttagatattatgtattgttttactctgattaggttactgtgataggcatttattcatattctttctataccactgtcattaatatattaaaaagatgtatgtgttagactatcgaaagggccttattctctctttctcatagactgaccttcttttggaatttctgagtcatttattttccttagctttttccactcaaattaagggcaagcgaaaaagtaataatttggcattctttaagcctacagaatgtgattctttcacttgtttattacactggctcgtggacagaacaatttgaaaagtgaaagaattattttggtaaaagattttgctttacttttcgaagcattatttttttaaagagtgttttactccaacgattgaaacattttcctatttaaatttcatcgttagaatcacaggaggcaaaaaatggaacggttgaatgaaattttactctttctgtgaaagaaaatccacagagttgttgcctccgttgtagttggtgggccccgttagcattggatgcctttgccaaatggttcatgtggacacacaaaggcaaacagatctgccatcgatcgcagatttctgtagaaacacggatgtgcatgtgcagattcccttttgcaggtattaaaaataattaaaaatagtcctgcctgaggttgcagtgagccgagcttgcactactgcactccagcctgggtgacagagtaagactccatgtcaaaaaaaaaaaaaaaaaaaaaaagtcctgccttaactaactcctctgcgcttgttcactagtaacctaaagaggctatattcattctttatgcaatgagggtatttttgagtgaattttaactgctctgaactaagtataagctcatgggcctgcaaaggttcagacggtttctcctttgcacccaggaggaactttggctgcgagaatggggggatgtatccctcatgcagttggcatccaggcagccctctgcagcagcacaccctgcaggcggagttttcagaggatgcaattttggatcccgaattttgatgtaccttaaacttccacatcactgcaccctgaaacagagcatgctttccagaaagtcacactctcagatctgtgtcaagttcaatgtgagccctggcaaggctggcatattaacacctgccttctggcttctgaaagtgagatttgtatatgggctgcactcacgcatatacgagttggtttatctttgtgtacatgactataacccagtgatgctgaggtcatgtgctggaatgctgtatttggaccacacatttcaaagttgccctatggaaatgaatcctacttagtgacaagtcatcaaatgtttgtcacatgtgatgaagacaaatatgtatacctggcatagagaaaaatatatacctggtacattggagaaaaataattacactttcaaagagaattccctttgcaattttatgtttggatcaccactgtaagcacactttatttgcatttgatctgtatttgtatatgctgatgcaatgataaaaatcactgtaatacttcattgtgttgtactggatgcaaagctagaaaatattgcaataaatgagaccgatgaaagac

SEQ ID NO: 825 - protein, 383 aa, Homo sapiens
MAGIPGLLFLLFFLLCAVGQVSPYSAPWKPTWPAYRLPVVLPQSTLNLAKPDFGAEAKLEVSSSCGPQCHKGTPLPTYEEAKQYLSYETLYANGSRTETQVGIYILSSSGDGAQHRDSGSSGKSRRKRQIYGYDSRFSIFGKDFLLNYPFSTSVKLSTGCTGTLVAEKHVLTAAHCIHDGKTYVKGTQKLRVGFLKPKFKDGGRGANDSTSAMPEQMKFQWIRVKRTHVPKGWIKGNANDIGMDYDYALLELKKPHKRKFMKIGVSPPAKQLPGGRIHFSGYDNDRPGNLVYRFCDVKDETYDLLYQQCDAQPGASGSGVYVRMWKRQQQKWERKIIGIFSGHQWVDMNGSPQDFNVAVRITPLKYAQICYWIKGNYLDCREG

SEQ ID NO: 826 - DNA, 1637 bp, Homo sapiens
ggcaggcatgggagccgcgcgctctctcccggcgcccacacctgtctgagcggcgcagcgagccgcggcccgggcgggctgctcggcgcggaacagtgctcggcatggcagggattccagggctcctcttccttctcttctttctgctctgtgctgttgggcaagtgagcccttacagtgccccctggaaacccacttggcctgcataccgcctccctgtcgtcttgccccagtctaccctcaatttagccaagccagactttggagccgaagccaaattagaagtatcttcttcatgtggaccccagtgtcataagggaactccactgcccacttacgaagaggccaagcaatatctgtcttatgaaacgctctatgccaatggcagccgcacagagacgcaggtgggcatctacatcctcagcagtagtggagatggggcccaacaccgagactcagggtcttcaggaaagtctcgaaggaagcggcagatttatggctatgacagcaggttcagcatttttgggaaggacttcctgctcaactaccctttctcaacatcagtgaagttatccacgggctgcaccggcaccctggtggcagagaagcatgtcctcacagctgcccactgcatacacgatggaaaaacctatgtgaaaggaacccagaagcttcgagtgggcttcctaaagcccaagtttaaagatggtggtcgaggggccaacgactccacttcagccatgcccgagcagatgaaatttcagtggatccgggtgaaacgcacccatgtgcccaagggttggatcaagggcaatgccaatgacatcggcatggattatgattatgccctcctggaactcaaaaagccccacaagagaaaatttatgaagattggggtgagccctcctgctaagcagctgccagggggcagaattcacttctctggttatgacaatgaccgaccaggcaatttggtgtatcgcttctgtgacgtcaaagacgagacctatgacttgctctaccagcaatgcgatgcccagccaggggccagcgggtctggggtctatgtgaggatgtggaagagacagcagcagaagtgggagcgaaaaattattggcattttttcagggcaccagtgggtggacatgaatggttccccacaggatttcaacgtggctgtcagaatcactcctctcaaatatgcccagatttgctattggattaaaggaaactacctggattgtagggaggggtgacacagtgttccctcctggcagcaattaagggtcttcatgttcttattttaggagaggccaaattgttttttgtcattggcgtgcacacgtgtgtgtgtgtgtgtgtgtgtgtgtaaggtgtcttataatcttttacctatttcttacaattgcaagatgactggctttactatttgaaaactggtttgtgtatcatatcatatatcatttaagcagtttgaaggcatacttttgcatagaaataaaaaaaatactgatttggggcaatgaggaatatttgacaattaagttaatcttcacgtttttgcaaactttgatttttatttcatctgaacttgtttcaaagatttatattaaatatttggcatacaagagatatga

SEQ ID NO: 827 - protein, 4834 aa, Homo sapiens
MPSESFCLAAQARLDSKWLKTDIQLAFTRDGLCGLWNEMVKDGEIVYTGTESTQNGELPPRKDDSVEPSGTKKEDLNDKEKKDEEETPAPIYRAKSILDSWVWGKQPDVNELKECLSVLVKEQQALAVQSATTTLSALRLKQRLVILERYFIALNRTVFQENVKVKWKSSGISLPPVDKKSSRPAGKGVEGLARVGSRAALSFAFAFLRRAWRSGEDADLCSELLQESLDALRALPEASLFDESTVSSVWLEVVERATRFLRSVVTGDVHGTPATKGPGSIPLQDQHLALAILLELAVQRGTLSQMLSAILLLLQLWDSGAQETDNERSAQGTSAPLLPLLQRFQSIICRKDAPHSEGDMHLLSGPLSPNESFLRYLTLPQDNELAIDLRQTAVVVMAHLDRLATPCMPPLCSSPTSHKGSLQEVIGWGLIGWKYYANVIGPIQCEGLANLGVTQIACAEKRFLILSRNGRVYTQAYNSDTLAPQLVQGLASRNIVKIAAHSDGHHYLALAATGEVYSWGCGDGGRLGHGDTVPLEEPKVISAFSGKQAGKHVVHIACGSTYSAAITAEGELYTWGRGNYGRLGHGSSEDEAIPMLVAGLKGLKVIDVACGSGDAQTLAVTENGQVWSWGDGDYGKLGRGGSDGCKTPKLIEKLQDLDVVKVRCGSQFSIALTKDGQVYSWGKGDNQRLGHGTEEHVRYPKLLEGLQGKKVIDVAAGSTHCLALTEDSEVHSWGSNDQCQHFDTLRVTKPEPAALPGLDTKHIVGIACGPAQSFAWSSCSEWSIGLRVPFVVDICSMTFEQLDLLLRQVSEGMDGSADWPPPQEKECVAVATLNLLRLQLHAAISHQVDPEFLGLGLGSILLNSLKQTVVTLASSAGVLSTVQSAAQAVLQSGWSVLLPTAEERARALSALLPCAVSGNEVNISPGRRFMIDLLVGSLMADGGLESALHAAITAEIQDIEAKKEAQKEKEIDEQEANASTFHRSRTPLDKDLINTGICESSGKQCLPLVQLIQQLLRNIASQTVARLKDVARRISSCLDFEQHSRERSASLDWLLRFQRLLISKLYPGESIGQTSDISSPELMGVGSLLKKYTALLCTHIGDILPVAASIASTSWRHFAEVAYIVEGDFTGVLLPELVVSIVLLLSKNADLMQEAGAVPLLGGLLEHLDRFNHLAPGKERDDHEELAWPGIMESFFTGQNCRNNEEVTLIRKADLENHNKDGGFWTVIDGKVYDIKDFQTQSLTGNSILAQFAGEDPVVALEAALQFEDTRESMHAFCVGQYLEPDQEIVTIPDLGSLSSPLIDTERNLGLLLGLHASYLAMSTPLSPVEIECAKWLQSSIFSGGLQTSQIHYRYNEEKDEDHCSSPGGTPASKSRLCSHRRALGDHSQAFLQAIADNNIQDHNVKDFLCQIERYCRQCHLTTPIMFPPEHPVEEVGRLLLCCLLKHEDLGHVALSLVHAGALGIEQVKHRTLPKSVVDVCRVVYQAKCSLIKTHQEQGRSYKEVCAPVIERLRFLFNELRPAVCNDLSIMSKFKLLSSLPRWRRIAQKIIRERRKKRVPKKPESMDDEEKIGNEESDLEEACILPHSPINVDKRPIAIKSPKDKWQPLLSTVTGVHKYKWLKQNVQGLYPQSPLLSTIAEFALKEEPVDVEKMRKCLLKQLERAEVRLEGIDTILKLASKNFLLPSVQYAMFCGWQRLIPEGIDIGEPLTDCLKDVDLIPPFNRMLLEVTFGKLYAWAVQNIRNVLMDASATFKELGIQPVPLQTITNENPSGPSLGTIPQARFLLVMLSMLTLQHGANNLDLLLNSGMLALTQTALRLIGPSCDNVEEDMNASAQGASATVLEETRKETAPVQLPVSGPELAAMMKIGTRVMRGVDWKWGDQDGPPPGLGRVIGELGEDGWIRVQWDTGSTNSYRMGKEGKYDLKLAELPAAAQPSAEDSDTEDDSEAEQTERNIHPTAMMFTSTINLLQTLCLSAGVHAEIMQSEATKTLCGLLRMLVESGTTDKTSSPNRLVYREQHRSWCTLGFVRSIALTPQVCGALSSPQWITLLMKVVEGHAPFTATSLQRQILAVHLLQAVLPSWDKTERARDMKCLVEKLFDFLGSLLTTCSSDVPLLRESTLRRRRVRPQASLTATHSSTLAEEVVALLRTLHSLTQWNGLINKYINSQLRSITHSFVGRPSEGAQLEDYFPDSENPEVGGLMAVLAVIGGIDGRLRLGGQVMHDEFGEGTVTRITPKGKITVQFSDMRTCRVCPLNQLKPLPAVAFNVNNLPFTEPMLSVWAQLVNLAGSKLEKHKIKKSTKQAFAGQVDLDLLRCQQLKLYILKAGRALLSHQDKLRQILSQPAVQETGTVHTDDGAVVSPDLGDMSPEGPQPPMILLQQLLASATQPSPVKAIFDKQELEAAALAVCQCLAVESTHPSSPGFEDCSSSEATTPVAVQHIHPARVKRRKQSPVPALPIVVQLMEMGFSRRNIEFALKSLTGASGNASSLPGVEALVGWLLDHSDIQVTELSDADTVSDEYSDEEVVEDVDDAAYSMSTGAVVTESQTYKKRADFLSNDDYAVYVRENIQVGMMVRCCRAYEEVCEGDVGKVIKLDRDGLHDLNVQCDWQQKGGTYWVRYIHVELIGYPPPSSSSHIKIGDKVRVKASVTTPKYKWGSVTHQSVGVVKAFSANGKDIIVDFPQQSHWTGLLSEMELVPSIHPGVTCDGCQMFPINGSRFKCRNCDDFDFCETCFKTKKHNTRHTFGRINEPGQSAVFCGRSGKQLKRCHSSQPGMLLDSWSRMVKSLNVSSSVNQASRLIDGSEPCWQSSGSQGKHWIRLEIFPDVLVHRLKMIVDPADSSYMPSLVVVSGGNSLNNLIELKTININPSDTTVPLLNDYTEYHRYIEIAIKQCRSSGIDCKIHGLILLGRIRAEEEDLAAVPFLASDNEEEEDEKGNSGSLIRKKAAGLESAATIRTKVFVWGLNDKDQLGGLKGSKIKVPSFSETLSALNVVQVAGGSKSLFAVTVEGKVYACGEATNGRLGLGISSGTVPIPRQITALSSYVVKKVAVHSGGRHATALTVDGKVFSWGEGDDGKLGHFSRMNCDKPRLIEALKTKRIRDIACGSSHSAALTSSGELYTWGLGEYGRLGHGDNTTQLKPKMVKVLLGHRVIQVACGSRDAQTLALTDEGLVFSWGDGDFGKLGRGGSEGCNIPQNIERLNGQGVCQIECGAQFSLALTKSGVVWTWGKGDYFRLGHGSDVHVRKPQVVEGLRGKKIVHVAVGALHCLAVTDSGQVYAWGDNDHGQQGNGTTTVNRKPTLVQGLEGQKITRVACGSSHSVAWTTVDVATPSVHEPVLFQTARDPLGASYLGVPSDADSSAASNKISGASNSKPNRPSLAKILLSLDGNLAKQQALSHILTALQIMYARDAVVGALMPAAMIAPVECPSFSSAAPSDASAMASPMNGEECMLAVDIEDRLSPNPWQEKREIVSSEDAVTPSAVTPSAPSASARPFIPVTDDLGAASIIAETMTKTKEDVESQNKAAGPEPQALDEFTSLLIADDTRVVVDLLKLSVCSRAGDRGRDVLSAVLSGMGTAYPQVADMLLELCVTELEDVATDSQSGRLSSQPVVVESSHPYTDDTSTSGTVKIPGAEGLRVEFDRQCSTERRHDPLTVMDGVNRIVSVRSGREWSDWSSELRIPGDELKWKFISDGSVNGWGWRFTVYPIMPAAGPKELLSDRCVLSCPSMDLVTCLLDFRLNLASNRSIVPRLAASLAACAQLSALAASHRMWALQRLRKLLTTEFGQSININRLLGENDGETRALSFTGSALAALVKGLPEALQRQFEYEDPIVRGGKQLLHSPFFKVLVALACDLELDTLPCCAETHKWAWFRRYCMASRVAVALDKRTPLPRLFLDEVAKKIRELMADSENMDVLHESHDIFKREQDEQLVQWMNRRPDDWTLSAGGSGTIYGWGHNHRGQLGGIEGAKVKVPTPCEALATLRPVQLIGGEQTLFAVTADGKLYATGYGAGGRLGIGGTESVSTPTLLESIQHVFIKKVAVNSGGKHCLALSSEGEVYSWGEAEDGKLGHGNRSPCDRPRVIESLRGIEVVDVAAGGAHSACVTAAGDLYTWGKGRYGRLGHSDSEDQLKPKLVEALQGHRVVDIACGSGDAQTLCLTDDDTVWSWGDGDYGKLGRGGSDGCKVPMKIDSLTGLGVVKVECGSQFSVALTKSGAVYTWGKGDYHRLGHGSDDHVRRPRQVQGLQGKKVIAIATGSLHCVCCTEDGEVYTWGDNDEGQLGDGTTNAIQRPRLVAALQGKKVNRVACGSAHTLAWSTSKPASAGKLPAQVPMEYNHLQEIPIIALRNRLLLLHHLSELFCPCIPMFDLEGSLDETGLGPSVGFDTLRGILISQGKEAAFRKVVQATMVRDRQHGPVVELNRIQVKRSRSKGGLAGPDGTKSVFGQMCAKMSSFGPDSLLLPHRVWKVKFVGESVDDCGGGYSESIAEICEELQNGLTPLLIVTPNGRDESGANRDCYLLSPAARAPVHSSMFRFLGVLLGIAIRTGSPLSLNLAEPVWKQLAGMSLTIADLSEVDKDFIPGLMYIRDNEATSEEFEAMSLPFTVPSASGQDIQLSSKHTHITLDNRAEYVRLAINYRLHEFDEQVAAVREGMARVVPVPLLSLFTGYELETMVCGSPDIPLHLLKSVATYKGIEPSASLIQWFWEVMESFSNTERSLFLRFVWGRTRLPRTIADFRGRDFVIQVLDKYNPPDHFLPESYTCFFLLKLPRYSCKQVLEEKLKYAIHFCKSIDTDDYARIALTGEPAADDSSDDSDNEDVDSFASDSTQDYLTGH

SEQ ID NO: 828 - DNA, 15304 bp, Homo sapiens
gaggcgaggcggccgggccctgcgcgtcaggcctgagacctgggaggaagctggagaaaagatgccctctgaatctttctgtttggctgcccaggctcgcctcgactccaaatggttgaaaacagatatacagcttgcattcacaagagatgggctctgtggtctgtggaatgaaatggttaaagatggagaaattgtatacactggaacagaatcaacccagaacggagagctccctcctagaaaagatgatagtgtcgaaccaagtggaacaaagaaagaagatctgaatgacaaagagaaaaaagatgaagaagaaactcctgcacctatatatagggccaagtcaattctggacagctgggtatggggcaagcaaccagatgtgaatgaactgaaggagtgtctttctgtgctggttaaagagcagcaggccctggccgtccagtcagccaccaccaccctctcagccctgcgactcaagcagaggctggtgatcttggagcgctatttcattgccttgaatagaaccgtttttcaggagaatgtcaaagttaagtggaaaagcagcggtatttctctgcctcctgtggacaaaaaaagttcccggcctgcgggcaaaggtgtggaggggctcgccagagtgggatcccgagcggcgctgtcttttgcctttgccttcctgcgcagggcctggcgatcaggcgaggatgcggacctctgcagtgagctgttgcaggagtccctggacgccctgcgagcacttcccgaggcctcgctctttgacgagagcaccgtgtcctctgtgtggctggaggtggtggagagagcgaccaggttcctcaggtccgtcgtgacgggggatgttcacggaacgccagccaccaaagggccaggaagcatccccctgcaggaccagcacttggccctggccatcctgctggagctggctgtgcagagaggcacgctgagccaaatgttgtctgccatcctgttgttgcttcagctgtgggacagcggggcacaggagactgacaatgagcgttccgcccagggcaccagcgccccacttttgcccttgctgcaaaggttccagagcatcatttgcaggaaggatgcaccccactccgagggcgacatgcaccttttgtctggccctctgagccccaatgagagtttcctgaggtacctcacccttccacaagacaacgagcttgccattgatctgcgacaaacggcggttgttgtcatggcccatttagaccgtctggctacgccctgtatgcctccgctgtgtagctctccgacatctcataagggatcattgcaagaggtcataggttgggggttaataggatggaaatactatgccaatgtgattggtccaatccagtgcgaaggcctggccaacctgggagtcacacagattgcctgtgcagagaagcgtttcctgattctgtcacgcaatggccgcgtgtacacacaggcctataatagtgacacgctggccccacagctggtccaaggccttgcctccagaaacattgtaaaaattgctgcccattctgatggtcaccactacctagccttggctgctactggagaggtgtactcctggggctgtggggacggcggacggctgggccatggggacactgtgcctttggaggagcctaaggtgatctccgccttctctggaaagcaggccgggaagcacgtggtgcacatcgcttgcgggagcacttacagtgcggccatcactgccgagggggagctgtacacctggggccgcgggaactacggccggctgggccatggctccagtgaggacgaggccattccgatgctggtagccgggcttaaaggactgaaggtcatcgatgtggcgtgtgggagtggggatgctcaaaccctggctgtcactgagaacgggcaagtgtggtcttggggagatggtgactatgggaaattgggcagaggtggtagtgatggctgcaaaaccccaaagctgattgaaaagcttcaagacttggatgtggtcaaagtccgctgtggaagtcagttttccattgctttgacgaaagatggccaagtttattcatggggaaaaggtgacaaccagagacttggacatggaacagaggaacatgttcgttatccaaaactcttagaaggcttgcaagggaagaaggtgattgatgtggctgcaggctccacccactgcctggctctgactgaggacagcgaggtccacagctgggggagcaacgaccagtgccagcactttgacaccttgcgcgtgaccaagccagaacctgcagcattgccaggactggacaccaaacacatagtgggaattgcctgtgggcctgcccagagctttgcttggtcatcatgttctgagtggtccattggcctccgtgtcccttttgtggtggacatctgctcaatgacttttgagcagctagatctcctgcttcggcaggtgagtgaggggatggatggctccgcggactggcccccgccccaggagaaagagtgtgtggccgtggcaacgctgaatcttctacgacttcagttgcatgctgccattagtcaccaggttgacccggaattccttggtttaggtctgggcagcatcctcctgaacagcctgaagcagacggtggtgaccctggccagcagtgcgggcgtgctgagcaccgtgcagtcggccgcccaggccgtgctgcagagtggctggtccgtgctgctgcccaccgcggaggagcgggcccgggcactctctgctctcctgccctgcgcagtttcaggcaatgaagtgaacataagtccaggtcgtcgattcatgattgatcttctggtgggcagcttgatggctgatggagggttggagtcagccttacacgcagccattactgcagagatccaggatattgaagccaaaaaagaagcacagaaggaaaaagaaattgatgaacaggaagcgaatgcctcaacatttcatagaagcaggactccactggataaagaccttattaatacggggatctgtgagtcttctggcaaacagtgtttgcctctggttcagctcatacaacagcttcttagaaacatcgcttctcagactgtagccagattgaaagatgttgcccgtcggatttcatcatgtctggactttgagcaacacagtcgtgaaagatctgcttcattggattggttactgcgtttccaacgtttgcttattagtaaactttatccaggagaaagtattggtcagacctcagatatttctagtccagagctaatgggtgttggttccttgctgaagaagtacacagccctcctgtgcacgcacattggagatatactgcctgtggccgccagcattgcttctaccagctggcggcacttcgcggaggtggcttacattgtggaaggggactttactggtgttctccttccagaactagtagtttctatagtgcttctgctcagtaaaaatgctgatctcatgcaagaggctggagctgtacctctgctgggtggcctgttggaacatctggatcggttcaaccatctggcaccaggaaaggaacgggatgatcatgaagagttagcctggcctggcataatggagtcattttttacaggtcagaactgtagaaataatgaggaagtgacacttatacgcaaagctgatttggagaaccataataaagatggaggcttctggactgtgattgacgggaaggtgtatgatataaaggacttccagacacagtcgttaacaggaaatagtattcttgctcagtttgcaggggaagacccagtggtagctttggaagctgctttgcagtttgaagacacccgggaatccatgcacgcgttttgtgttggccagtatttggagcctgaccaagaaatcgtcaccataccagatctggggagtctctcttcacctctgatagacacagagaggaatctgggcctgcttctcggattacacgcttcgtatttggcaatgagcacaccgctgtctcctgtcgagattgaatgtgccaaatggcttcagtcatccatcttctctggaggcctgcagaccagccagatccactacaggtacaacgaggagaaagacgaggaccactgcagctccccagggggcacacctgccagcaaatctcgactctgctcccacagacgggccctgggggaccattcccaggcatttctgcaagccattgcagacaacaacattcaggatcacaacgtgaaggactttttgtgtcaaatagaaaggtactgtaggcagtgccatttgaccacaccgatcatgtttccccccgagcatcccgtggaagaggtcggtcgcttgttgttatgttgcctcttaaaacatgaagatttaggtcatgtggcattatctttagttcatgcaggtgcacttggtattgagcaagtaaagcacagaacgttgcctaagtcagtggtggatgtttgtagagttgtctaccaagcaaaatgttcgctcattaagactcatcaagaacagggccgttcttacaaggaggtctgcgctcctgtcatcgaacgtttgagattcctctttaatgaattgagacctgctgtttgtaatgacctctctataatgtctaagtttaaattgttaagttctttgccccgttggaggaggatagctcaaaagataattcgagaacgaaggaaaaagagagttcctaagaagccagaatctatggatgatgaagaaaaaattggaaacgaagagagtgatttagaagaagcttgcattttgcctcatagtccaataaatgtggacaagagacccattgcaattaaatcacccaaggacaaatggcagccgctgttgagtactgttacaggtgttcacaaatacaagtggttgaagcagaatgtgcagggtctttatccgcagtctccactcctcagtacaattgctgaatttgcccttaaagaagagccagtggatgtggaaaaaatgagaaagtgcctactaaaacagttggagagagcagaggttcgcctggaagggatagatacaattttaaaactggcgagcaagaatttcttacttccatctgtgcagtatgcgatgttttgtggatggcaaagacttattcctgagggaatcgatataggggaacctcttactgattgtttaaaggatgttgatttgatcccgccttttaatcggatgctgctggaagtcacctttggcaagctgtacgcttgggctgtacagaacattcgaaatgttttgatggatgccagtgccacatttaaagagcttggtatccagccggttcccctccaaaccatcaccaatgagaacccgtcaggaccgagcctggggaccatcccgcaagcccgcttcctcctggtgatgctcagcatgctcaccctgcagcacggcgcaaacaacctcgaccttctgctcaattccggcatgctggccctcacgcagacggcactgcgcctgattggccccagttgtgacaacgttgaggaagatatgaatgcttctgctcaaggtgcttctgccacagttttggaagaaacaaggaaggaaacggctcctgtgcagctccctgtttcaggaccagaactggctgccatgatgaagattggaacaagggtcatgagaggtgtggactggaaatggggcgatcaggatgggcctcctccaggcctaggccgcgtgattggtgagctgggagaggacggatggataagagtccagtgggacacaggcagcaccaactcctacaggatggggaaagaaggaaaatacgacctcaagctggcagagctgccggctgctgcacagccctcagcagaggattcggacacagaggatgactctgaagccgaacaaactgaaaggaacattcaccccactgcaatgatgtttaccagcactattaacttactgcagactctttgtctgtctgctggagttcatgctgagatcatgcagagcgaagccaccaagactttatgcggactgctgcgaatgttagtggaaagcggaacgacggacaagacatcttctccaaacaggctggtgtacagggagcaacaccggagctggtgcacgctggggtttgtgcggagcatcgctctcacgccgcaggtatgcggcgccctcagctccccgcagtggatcacgctgctcatgaaggtcgtggaagggcacgcacccttcactgccacctcgctgcagaggcagatcttagctgtgcatttgttgcaagcagtccttccatcatgggacaagaccgaaagggcgagggacatgaaatgcctcgtggagaagctgtttgacttcttgggaagcttgctcactacctgctcctctgacgtgccattactcagagagtccacgctgaggcggcgcagggtgcgcccgcaggcctcgctgactgccacccacagcagcacactggcggaggaggtggtggcactgctgcgcacgctgcactccctgactcagtggaatgggctcatcaacaagtacatcaactcccagctccgctccatcacccacagctttgtgggaaggccttccgaaggggcccagttagaggactacttccccgactccgagaaccctgaagtggggggcctcatggcagtcctggctgtgattggaggcatcgatggtcgcctgcgcctgggcggtcaagttatgcacgatgagtttggagaaggcactgtgactcgcatcaccccaaagggcaaaatcaccgtgcagttctctgacatgcggacgtgtcgcgtttgcccattgaatcagctgaaaccactccctgccgtggcctttaatgtgaacaacctgcccttcacagagcccatgctgtctgtctgggctcagttggtgaacctcgctggaagcaagttagaaaagcacaaaataaagaaatcgactaaacaggcctttgcaggacaagtggacctggacctgctgcggtgccagcagttgaagctatacatcctgaaagcaggtcgggcgctgctctcccaccaggataaactgcggcagatcctgtctcagccagctgttcaggagactggaactgttcacacagatgatggagcagtggtatcacctgaccttggggacatgtctcctgaagggccgcagccccccatgatcctcttgcagcagctgctggcctcggccacccagccgtctcctgtgaaggccatatttgataaacaggaacttgaggctgctgcactggccgtttgccagtgcttggctgtggagtccactcacccttcgagcccaggatttgaagactgcagctccagtgaggccaccacgcctgtcgccgtgcagcacatccaccctgccagagtgaagaggcgcaagcagtcgcccgttcccgctctgccgatcgtggtgcagctcatggagatgggattttccagaaggaacatcgagtttgccctgaagtctctcactggtgcttccgggaatgcatccagcttgcctggtgtggaagccttggtcgggtggctgctggaccactccgacatacaggtcacggagctctcagatgcagacacggtgtccgacgagtattctgacgaggaggtggtggaggacgtggatgatgccgcctactccatgtctactggtgctgttgtgacggagagccagacgtacaaaaaacgagctgatttcttgagtaatgatgattatgctgtatatgtgagagagaatattcaggtgggaatgatggttagatgctgccgagcgtatgaagaagtgtgcgaaggtgatgttggcaaagtcatcaagctggacagagatggattgcatgatctcaatgtgcagtgtgactggcagcagaaagggggcacctactgggttaggtacattcatgtggaacttataggctatcctccaccaagttcttcttctcacatcaagattggtgataaagtgcgggtcaaagcctctgtcaccacaccaaaatacaaatggggatctgtgactcatcagagtgtgggggttgtgaaagctttcagtgccaatggaaaagatatcattgtcgactttccccagcagtctcactggactgggttgctatcagaaatggagttggtacccagtattcatcctggggttacgtgtgatggatgtcagatgtttcctatcaatggatccagattcaaatgcagaaactgtgatgactttgatttttgtgaaacgtgtttcaagaccaaaaaacacaataccaggcatacatttggcagaataaatgaaccaggtcagtctgcggtattttgtggccgttctggaaaacagctgaagcgttgccacagcagccagccaggcatgctgctggacagctggtcccgcatggtgaagagcctgaatgtgtcgtcctccgtgaaccaggcatcccgtctcattgacggcagcgagccctgctggcagtcatcggggtcgcaaggaaagcactggattcgtttggagattttcccagatgttcttgttcatagattaaaaatgatcgtagatcctgctgacagtagctacatgccgtccctggttgtagtgtcaggtggaaattccctgaataaccttattgaactaaagacaatcaatattaacccttctgacaccacagtgccccttctgaatgactacacagagtatcacaggtatattgaaattgctataaagcagtgcaggagctcaggaatcgattgtaaaatccatggtctcatcctgctgggacggatccgtgcagaagaggaagatttggctgcagttcctttcttagcttcggataatgaagaggaggaggatgagaaaggcaacagcggaagcctcattagaaagaaggctgctgggctggaatcagcagctacgataagaaccaaggtgtttgtgtggggcctgaatgacaaggaccagctgggcgggctgaaaggctccaagataaaggttccttcgttctctgagacactgtcagctttgaatgtggtacaggtggctggtggatctaaaagtttgtttgcagtgactgtggaagggaaggtgtatgcctgtggagaagccacgaatggccggctggggctgggcatttccagcgggacggtgcccatcccacggcagatcacagctctcagcagctacgtggtcaagaaggtggctgttcactcaggtggccggcacgcgacggctttaactgtcgatggaaaagtgttttcgtggggcgaaggtgacgatggaaaacttggacacttcagcagaatgaactgtgacaaaccaaggctgatcgaggccctgaaaaccaagcgtatccgggatatcgcctgtgggagctcgcacagcgcagccctcacatccagcggagaactgtacacctggggcctcggcgagtacggccggctgggacatggggataatacgacacagctaaagcccaaaatggtgaaagtccttctcggtcacagagtaatccaggttgcatgtgggagtagagacgcgcagaccctggctctgaccgatgaaggtttggtattttcctggggtgatggtgactttggaaaactgggccggggcggaagtgaaggctgtaacattccccagaacattgagagactaaatggacagggggtgtgccagattgagtgtggagctcagttctccctggcgctcaccaagtctggagtggtgtggacatggggaaagggggattacttcagattgggccacggctctgacgtgcacgtgcggaaaccacaggtggtggaagggctgagagggaagaagatcgtgcatgtggctgtcggggccctgcactgcctggcggtcacggactcggggcaggtgtatgcttggggtgacaacgaccacggccagcagggcaatggcacgaccacggttaacaggaagcccacactcgtgcaaggcttagaaggccagaagatcacacgcgtggcttgtgggtcgtcccacagtgtggcgtggacaactgtggatgtggccacgccctctgtccacgagcccgtcctcttccagactgcaagagacccgttaggtgcttcctacttaggcgtgccctcagatgctgattcttctgctgccagtaataaaataagtggtgcaagtaattctaagccaaatcgcccttctcttgccaagattctcttgtcattggatggaaatctggccaaacagcaggccttatcgcatattcttacagcattgcaaatcatgtatgccagagatgctgttgtcggggccctgatgccggccgccatgatcgccccggtggagtgcccctcgttctcctcggcggccccttccgacgcatctgcgatggctagtcccatgaatggagaagaatgcatgctggctgttgatatcgaagacagactgagtccaaatccatggcaagaaaagagagagattgtttcctctgaggacgcagtgaccccctctgcagtgactccgtcggccccctcagcctccgctcggccttttatcccagtgacggatgacctgggagctgcaagcatcattgcagaaaccatgaccaaaaccaaagaggatgttgaaagccaaaataaagcagcaggtccggagcctcaggccttggatgagttcaccagtctgctgattgcggatgacactcgtgtggtggtagacctgctcaagctgtcagtgtgcagccgggccggggacaggggcagggatgtgctctccgcggtgctttccggcatggggaccgcctacccacaggtggcagatatgctgttggagctctgtgtcaccgagttggaggatgtggccacagactcgcagagcggccgcctctcttctcagcctgtggtggtggagagtagccacccttacaccgacgacacctccaccagtggcacagtgaagataccaggtgcagaaggactcagggtagaatttgaccggcagtgctccacagagaggcgccacgaccctctcacagtcatggacggcgtcaacaggatcgtctccgtgcggtcaggccgagagtggtccgactggtccagcgagctgcgcatcccaggggatgagttaaagtggaagttcatcagcgatgggtctgtgaatggctggggctggcgcttcaccgtctatcccatcatgccagctgctggccctaaagaactcctctctgaccgctgcgtcctctcctgtccatccatggacttggtgacgtgtctgttagacttccgactcaaccttgcctctaacagaagcatcgtccctcgccttgcggcctcgctggcagcttgtgcacagctgagtgccctagctgccagtcacagaatgtgggcccttcagagactgaggaagctgcttacaactgaatttgggcagtcaattaacataaataggctgcttggagaaaatgatggggaaacaagagctttgagttttacaggtagtgctcttgctgctttggtgaaaggtcttccagaagctttgcaaaggcagtttgaatatgaagatcctattgtgaggggtggcaaacagctgctccacagcccattctttaaggtactagtagctcttgcttgtgacctggagctggacactctgccttgctgtgccgagacgcacaagtgggcctggttccggaggtactgcatggcctcccgtgttgctgtggcccttgacaaaagaacaccgttgccccgtctgtttcttgatgaggtggctaagaaaattcgtgaattaatggcagacagcgaaaacatggatgttctgcatgagagccatgacatttttaaaagagagcaagacgaacaacttgtgcagtggatgaacaggcgaccagatgactggactctctctgctggtggcagtggaacaatttatggatggggacataatcacaggggccagctcgggggcattgaaggcgcaaaagtcaaagttcccactccctgtgaagcccttgcaactctcagacccgtgcagttaatcggaggggaacagaccctctttgctgtgacggctgatgggaagctgtatgccactgggtatggtgcaggtggcagactaggcattggagggacagagtcggtgtccaccccaacattgcttgaatccattcagcatgtgtttattaagaaagtagctgtgaactctggaggaaagcactgccttgccctgtcttcagaaggagaagtttactcttggggtgaggcagaagatgggaagttggggcatggcaacagaagtccgtgtgaccgccctcgtgtcatcgagtctctgagaggaattgaagtggtcgatgttgctgctggcggagcccacagcgcctgtgtcacagcagccggggacctctacacatggggcaaaggccgctacggccggctggggcacagcgacagtgaggaccagctgaagccgaagctggtggaggcgctgcagggccaccgtgtggttgacatcgcctgtggcagtggagatgcccagaccctctgcctcacagatgacgacactgtctggtcctggggggacggggactacggcaagctcggccggggaggcagcgatggctgtaaagtgcctatgaagattgattctcttactggtcttggagtagttaaagtggaatgcggatcccagttttctgttgcccttaccaaatctggagctgtttatacctggggcaaaggcgattatcacaggttgggccatggatcagatgaccatgttcgaaggcctcggcaggtccaagggttgcaggggaagaaagtcatcgccatcgccactggctccctgcactgtgtgtgctgcacagaggatggtgaggtttatacatggggcgacaatgatgagggacaactgggagacggaaccaccaatgccatccagaggcctcggttggtagctgcccttcagggtaagaaggtcaaccgtgtggcctgtggctcagcacataccctcgcctggtcgaccagcaagcccgccagtgctggcaaactccctgcacaggtccccatggagtacaatcacctgcaggagatccccatcattgcgctgaggaaccgtctgctgctgctgcaccacctctccgagctcttctgcccctgcatccccatgttcgacctggaaggctcgctcgacgaaactggactcgggccttctgttgggttcgacactctccgaggaattctgatatcccagggaaaggaggcggctttccggaaagtagtacaagcaactatggtacgcgatcgtcagcatggccccgtcgtggagctgaaccgcatccaggtcaaacgatcaaggagcaaaggcgggctggccggccccgacggcaccaagtctgtctttgggcagatgtgtgctaagatgagctcgtttggtcccgacagcctcctccttcctcaccgtgtctggaaagtcaagtttgtgggtgaatctgtggatgactgtgggggcggctacagcgagtccatagctgagatctgtgaggagctgcagaacggactcacgcccctgctgatcgtgacacccaacgggagggatgagtctggggccaaccgagactgctacctgctcagcccggccgccagagcacccgtgcacagcagcatgttccgcttcctgggtgtgttgctgggcattgccatccgaaccgggagtcccctgagcctcaaccttgccgagcctgtctggaagcagctggctgggatgagcctcaccatcgcggacctcagtgaggttgataaggattttattcctggactcatgtacatccgagacaatgaagccacctcagaggagtttgaagccatgagcctgcccttcacagtgccaagtgccagtggccaggacattcagttgagctccaagcacacacacatcaccctggacaaccgcgcggagtacgtgcggctggcgataaactatagactccatgaatttgatgagcaggtggctgctgttcgggaaggaatggcccgcgttgtgcctgttcccctcctctctctgttcaccggctacgaactggagacgatggtgtgtggcagccctgacatcccgctgcaccttctcaagtcggtggccacctataaaggcatcgagccttccgcatcgctgatccagtggttctgggaggtgatggagtccttctccaacacagagcgctctcttttccttcgcttcgtctggggccggacgaggctgcccaggaccatcgccgacttccggggccgagacttcgtcatccaggtgttggataaatacaaccctccagaccacttcctccctgagtcctacacctgtttcttcttgctgaagctgcccaggtattcctgcaagcaggtgctggaggagaagctcaagtacgccatccacttctgcaagtccatagacacagatgactacgctcgcatcgcacttacaggagagccagccgccgacgacagcagcgacgattcagataacgaggatgtcgactcctttgcttcggactctacacaagattatttaacaggacactaagatggggaaacgtcctcgtgagatgagagcctgagccaggcagcagagcactcgctgctgtgtagactgtaggctgcctggtgtgtctgatgagaagcgtccgtcctcgagccaggcgggaggagggagtggagagactgactggccgtgatgggaatgacagtgagaaggtccgcctgtgcgcgtggaacactgtggacgctcgacttccaagggtcttctcacccgtaatgctgcattacatgtaggactgtgtttactaaagtgtgtaaatgtttatataaataccaaattgcagcatccccaaaatgaataaagcctttttacttgtgggtgcaatcgatttttttttctttctcctttctttcaagtgtcgtgagtcgtcttgattgtatattggaaataactgtgtaacaaatcgtattataaatatttcaattaattttactctgaatttgtttattaaaagacttttgaacatgaaatgattagtattacttgaatgcatccagaggatatttaaaccaaaatgaaaaaccagaaggccatttggtgtcccctctcccaggtgtccccttgtagcatatgcattatgtcatctgaattgaggcctttctgtgaacagcatcataacttctatcatggaaagtgtactatatataatgtttgtgtcatgtatatgcctaaattttaatcatctataaataaaacatctgacataaaaaaaaaaaaaaaaaa

SEQ ID NO: 829 - protein, 480 aa, Homo sapiens
MEVAPEQPGWMAHPAVLNAHDPDSHHPGLAHNYMEPAHVLPPDEVDVFFNHLDSQGNPYYANPAHARAAVSYSPAHARLTGSQMCRPHLLHSPGLPWLDGGKAALSAAAAHHHNPWTVSPFSKTPLHPSAAGGPGGPLSVYPGAGGGSGGGSGSSVASLTPTAAHSGSHLFGFPPTPPKEVSPDPSTTGAASPASSSAGGSAARGEDKDGVKYQVSLTESMKMESGSPLRPGLATMGTQPATHHPIPTYPSYVPAAAHDYSSGLFHPGGFLGGPASSFTPKQRSKARSCSEGRECVNCGATATPLWRRDGTGHYLCNACGLYHKMNGQNRPLIKPKRRLSAARRAGTCCANCQTTTTTLWRRNANGDPVCNACGLYYKLHNVNRPLTMKKEGIQTRNRKMSNKSKKSKKGAECFEELSKCMQEKSSPFSAAALAGHMAPVGHLPPFSHSGHILPTPTPIHPSSSLSFGHPHPSSMVTAMG

SEQ ID NO: 830 - DNA, 2729 bp, Homo sapiens
tcgagatccattgtgctctaaagggagtcggcagctggcgccagggcggccggaggatgccgaggggccggagccgggcgggcccgagcgcgaggcgcactctacccccagctcctaccctgtaagccccgccagcctccggacgtgctgtccctgggcccgtcgccctcggggctcccgccggaactccttcactctcagaggccgagtccctcccctccccacggctgcgtgtggccgttgccgtctgcacccagaccctgagccgcccgcgccggccatggaggtggcgccggagcagcccggctggatggcgcacccggccgtgctgaatgcgcacgaccccgactcacaccacccgggcctggcgcacaactacatggaacccgcgcacgtgctgcctccagacgaggtggacgtcttcttcaatcacctcgactcgcagggcaacccctactatgccaaccccgctcacgcgcgggcggccgtctcctacagccccgcgcacgcccgcctgaccgggagccagatgtgccgcccacacttgttgcacagcccgggtttgccctggctggacgggggcaaagcagccctctctgccgctgcggcccaccaccacaacccctggaccgtgagccccttctccaagacgccactgcacccctcagctgctggaggccctggaggcccactctctgtgtacccaggggctgggggtgggagcgggggaggcagcgggagctcagtggcctccctcacccctacagcagcccactctggctcccaccttttcggcttcccacccacgccacccaaagaagtgtctcctgaccctagcaccacgggggctgcgtctccagcctcatcttccgcggggggtagtgcagcccgaggagaggacaaggacggcgtcaagtaccaggtgtcactgacggagagcatgaagatggaaagtggcagtcccctgcgcccaggcctagctactatgggcacccagcctgctacacaccaccccatccccacctacccctcctatgtgccggcggctgcccacgactacagcagcggactcttccaccccggaggcttcctggggggaccggcctccagcttcacccctaagcagcgcagcaaggctcgttcctgttcagaaggccgggagtgtgtcaactgtggggccacagccacccctctctggcggcgggacggcaccggccactacctgtgcaatgcctgtggcctctaccacaagatgaatgggcagaaccgaccactcatcaagcccaagcgaagactgtcggccgccagaagagccggcacctgttgtgcaaattgtcagacgacaaccaccaccttatggcgccgaaacgccaacggggaccctgtctgcaacgcctgtggcctctactacaagctgcacaatgttaacaggccactgaccatgaagaaggaagggatccagactcggaaccggaagatgtccaacaagtccaagaagagcaagaaaggggcggagtgcttcgaggagctgtcaaagtgcatgcaggagaagtcatcccccttcagtgcagctgccctggctggacacatggctcctgtgggccacctcccgcccttcagccactccggacacatcctgcccactccgacgcccatccacccctcctccagcctctccttcggccacccccacccgtccagcatggtgaccgccatgggctagggaacagatggacgtcgaggaccgggcactcccggatgggtggaccaaacccttagcagcccagcatttcccgaagccgacaccactcctgcctgcccggctcggcccagcaccccctctcctggagggcgcccagcagcctgccagcagttactgtgaatgttccccaccgctgagaggctgcctccgcacctgaccgctgcccaggtggggtttcctgcatggacagttgtttggagaacaacaaggacaactttatgtagagaaaaggaggggacgggacagacgaaggcaaccatttttagaaggaaaaaggattaggcaaaaataatttattttgctcttgtttctaacaaggacttggagacttggtggtctgagctgtcccaagtcctccggttcttcctcgggattggcgggtccacttgccagggctctgggggcagatttgtggggacctcagcctgcaccctcttctcctctggcttccctctctgaaatagccgaactccaggctgggctgagccaaagccagagtggccacggccagggagggtgagctggtgcctgctttgacgggccaggcctggagggagagacaatcacgggcggtcctgcacagattcccaggccagggctgggtcacaggaaggaaacaacattttcttgaaaggggaaacgtctcccagatcgctcccttggctttgaggccgaagctgctgtgactgtgtccccttactgagcgcaagcacagcctgtcttgtcaggtggaccctgtaaatacatccttttttctgctaacccttcaaccccctcgcctcctactctgagacaaaagaaaaaatattaaaaaaatgcataggcttaactcgctgatgagttaattgttttatttttaaactcttttggggtccagttgattgtacgtagccacaggagccctgctatgaaaggaataaaacctaaggttgggagctttgcaattctttttgggaaaaggggcctt

SEQ ID NO: 831 - protein, 2026 aa, Homo sapiens
AACVLPGAGGTCPERALERREEEANVVLTGTVEEILNVDPVQHTYSCKVRVWRYLKGKDLVARESLLDGGNKVVISGFGDPLICDNQVSTGDTRIFFVNPAPPYLWPAHKNELMLNSSLMRITLRNLEEVEFCVEDKPGTHFTPVPPTPPDACRGMLCGFGAVCEPNAEGPGRASCVCKKSPCPSVVAPVCGSDASTYSNECELQRAQCSQQRRIRLLSRGPCGSRDPCSNVTCSFGSTCARSADGLTASCLCPATCRGAPEGTVCGSDGADYPGECQLLRRACARQENVFKKFDGPCDPCQGALPDPSRSCRVNPRTRRPEMRLRPESCPARQAPVCGDDGVTYENDCVMGRSGAARGLLLQKVRSGQCQGRDQCPEPCRFNAVCLSRRGRPRCSCDRVTCDGAYRPVCAQDGRTYDSDCWRQQAECRQQRAIPSKHQGPCDQAPSPCLGVQCAFGATCAVKNGQAACECLQACSSLYDPVCGSDGVTYGSACELEATACTLGREIQVARKGPCDRCGQCRFGALCEAETGRCVCPSECVALAQPVCGSDGHTYPSECMLHVHACTHQISLHVASAGPCETCGDAVCAFGAVCSAGQCVCPRCEHPPPGPVCGSDGVTYGSACELREAACLQQTQIEEARAGPCEQAECGSGGSGSGEDGDCEQELCRQRGGIWDEDSEDGPCVCDFSCQSVPGSPVCGSDGVTYSTECELKKARCESQRGLYVAAQGACRGPTFAPLPPVAPLHCAQTPYGCCQDNITAARGVGLAGCPSACQCNPHGSYGGTCDPATGQCSCRPGVGGLRCDRCEPGFWNFRGIVTDGRSGCTPCSCDPQGAVRDDCEQMTGLCSCKPGVAGPKCGQCPDGRALGPAGCEADASAPATCAEMRCEFGARCVEESGSAHCVCPMLTCPEANATKVCGSDGVTYGNECQLKTIACRQGLQISIQSLGPCQEAVAPSTHPTSASVTVTTPGLLLSQALPAPPGALPLAPSSTAHSQTTPPPSSRPRTTASVPRTTVWPVLTVPPTAPSPAPSLVASAFGESGSTDGSSDEELSGDQEASGGGSGGLEPLEGSSVATPGPPVERASCYNSALGCCSDGKTPSLDAEGSNCPATKVFQGVLELEGVEGQELFYTPEMADPKSELFGETARSIESTLDDLFRNSDVKKDFRSVRLRDLGPGKSVRAIVDVHFDPTTAFRAPDVARALLRQIQVSRRRSLGVRRPLQEHVRFMDFDWFPAFITGATSGAIAAGATARATTASRLPSSAVTPRAPHPSHTSQPVAKTTAAPTTRRPPTTAPSRVPGRRPPAPQQPPKPCDSQPCFHGGTCQDWALGGGFTCSCPAGRGGAVCEKVLGAPVPAFEGRSFLAFPTLRAYHTLRLALEFRALEPQGLLLYNGNARGKDFLALALLDGRVQLRFDTGSGPAVLTSAVPVEPGQWHRLELSRHWRRGTLSVDGETPVLGESPSGTDGLNLDTDLFVGGVPEDQAAVALERTFVGAGLRGCIRLLDVNNQRLELGIGPGAATRGSGVGECGDHPCLPNPCHGGAPCQNLEAGRFHCQCPPGRVGPTCADEKSPCQPNPCHGAAPCRVLPEGGAQCECPLGREGTFCQTASGQDGSGPFLADFNGFSHLELRGLHTFARDLGEKMALEVVFLARGPSGLLLYNGQKTDGKGDFVSLALRDRRLEFRYDLGKGAAVIRSREPVTLGAWTRVSLERNGRKGALRVGDGPRVLGESPVPHTVLNLKEPLYVGGAPDFSKLARAAAVSSGFDGAIQLVSLGGRQLLTPEHVLRQVDVTSFAGHPCTRASGHPCLNGASCVPREAAYVCLCPGGFSGPHCEKGLVEKSAGDVDTLAFDGRTFVEYLNAVTESEKALQSNHFELSLRTEATQGLVLWSGKATERADYVALAIVDGHLQLSYNLGSQPVVLRSTVPVNTNRWLRVVAHREQREGSLQVGNEAPVTGSSPLGATQLDTDGALWLGGLPELPVGPALPKAYGTGFVGCLRDVVVGRHPLHLLEDAVTKPELRPCPTP

SEQ ID NO: 832 - DNA, 7032 bp, Homo sapiens
gccgcgtgcgtcctgcccggagccggcgggacatgcccggagcgcgcgctggagcggcgcgaggaggaggcgaacgtggtgctcaccgggacggtggaggagatcctcaacgtggacccggtgcagcacacgtactcctgcaaggttcgggtctggcggtacttgaagggcaaagacctggtggcccgggagagcctgctggacggcggcaacaaggtggtgatcagcggctttggagaccccctcatctgtgacaaccaggtgtccactggggacaccaggatcttctttgtgaaccctgcacccccatacctgtggccagcccacaagaacgagctgatgctcaactccagcctcatgcggatcaccctgcggaacctggaggaggtggagttctgtgtggaagataaacccgggacccacttcactccagtgcctccgacgcctcctgatgcgtgccggggaatgctgtgcggcttcggcgccgtgtgcgagcccaacgcggaggggccgggccgggcgtcctgcgtctgcaagaagagcccgtgccccagcgtggtggcgcctgtgtgtgggtcggacgcctccacctacagcaacgaatgcgagctgcagcgggcgcagtgcagccagcagcgccgcatccgcctgctcagccgcgggccgtgcggctcgcgggacccctgctccaacgtgacctgcagcttcggcagcacctgtgcgcgctcggccgacgggctgacggcctcgtgcctgtgccccgcgacctgccgtggcgcccccgaggggaccgtctgcggcagcgacggcgccgactaccccggcgagtgccagctcctgcgccgcgcctgcgcccgccaggagaatgtcttcaagaagttcgacggcccttgtgacccctgtcagggcgccctccctgacccgagccgcagctgccgtgtgaacccgcgcacgcggcgccctgagatgcgcctacggcccgagagctgccctgcccggcaggcgccagtgtgtggggacgacggagtcacctacgaaaacgactgtgtcatgggccgatcgggggccgcccggggtctcctcctgcagaaagtgcgctccggccagtgccagggtcgagaccagtgcccggagccctgccggttcaatgccgtgtgcctgtcccgccgtggccgtccccgctgctcctgcgaccgcgtcacctgtgacggggcctacaggcccgtgtgtgcccaggacgggcgcacgtatgacagtgattgctggcggcagcaggctgagtgccggcagcagcgtgccatccccagcaagcaccagggcccgtgtgaccaggccccgtccccatgcctcggggtgcagtgtgcatttggggcgacgtgtgctgtgaagaacgggcaggcagcgtgtgaatgcctgcaggcgtgctcgagcctctacgatcctgtgtgcggcagcgacggcgtcacatacggcagcgcgtgcgagctggaggccacggcctgtaccctcgggcgggagatccaggtggcgcgcaaaggaccctgtgaccgctgcgggcagtgccgctttggagccctgtgcgaggccgagaccgggcgctgcgtgtgcccctctgaatgcgtggctttggcccagcccgtgtgtggctccgacgggcacacgtaccccagcgagtgcatgctgcacgtgcacgcctgcacacaccagatcagcctgcacgtggcctcagctggaccctgcgagacctgtggagatgccgtgtgtgcttttggggctgtgtgctccgcagggcagtgtgtgtgtccccggtgtgagcaccccccgcccggccccgtgtgtggcagcgacggtgtcacctacggcagtgcctgcgagctacgggaagccgcctgcctccagcagacacagatcgaggaggcccgggcagggccgtgcgagcaggccgagtgcggttccggaggctctggctctggggaggacggtgactgtgagcaggagctgtgccggcagcgcggtggcatctgggacgaggactcggaggacgggccgtgtgtctgtgacttcagctgccagagtgtcccaggcagcccggtgtgcggctcagatggggtcacctacagcaccgagtgtgagctgaagaaggccaggtgtgagtcacagcgagggctctacgtagcggcccagggagcctgccgaggccccaccttcgccccgctgccgcctgtggcccccttacactgtgcccagacgccctacggctgctgccaggacaatatcaccgcagcccggggcgtgggcctggctggctgccccagtgcctgccagtgcaacccccatggctcttacggcggcacctgtgacccagccacaggccagtgctcctgccgcccaggtgtggggggcctcaggtgtgaccgctgtgagcctggcttctggaactttcgaggcatcgtcaccgatggccggagtggctgtacaccctgcagctgtgatccccaaggcgccgtgcgggatgactgtgagcagatgacggggctgtgctcgtgtaagcccggggtggctggacccaagtgtgggcagtgtccagacggccgtgccctgggccccgcgggctgtgaagctgacgcttctgcgcctgcgacctgtgcggagatgcgctgtgagttcggtgcgcggtgcgtggaggagtctggctcagcccactgtgtctgcccgatgctcacctgtccagaggccaacgctaccaaggtctgtgggtcagatggagtcacatacggcaacgagtgtcagctgaagaccatcgcctgccgccagggcctgcaaatctctatccagagcctgggcccgtgccaggaggctgttgctcccagcactcacccgacatctgcctccgtgactgtgaccaccccagggctcctcctgagccaggcactgccggccccccccggcgccctccccctggctcccagcagtaccgcacacagccagaccacccctccgccctcatcgcgacctcggaccactgccagcgtccccaggaccaccgtgtggcccgtgctgacggtgccccccacggcaccctcccctgcacccagcctggtggcgtccgcctttggtgaatctggcagcactgatggaagcagcgatgaggaactgagcggggaccaggaggccagtgggggtggctctggggggctcgagcccttggagggcagcagcgtggccacccctgggccacctgtcgagagggcttcctgctacaactccgcgttgggctgctgctctgatgggaagacgccctcgctggacgcagagggctccaactgccccgccaccaaggtgttccagggcgtcctggagctggagggcgtcgagggccaggagctgttctacacgcccgagatggctgaccccaagtcagaactgttcggggagacagccaggagcattgagagcaccctggacgacctcttccggaattcagacgtcaagaaggatttccggagtgtccgcttgcgggacctggggcccggcaaatccgtccgcgccattgtggatgtgcactttgaccccaccacagccttcagggcacccgacgtggcccgggccctgctccggcagatccaggtgtccaggcgccggtccttgggggtgaggcggccgctgcaggagcacgtgcgatttatggactttgactggtttcctgcgtttatcacgggggccacgtcaggagccattgctgcgggagccacggccagagccaccactgcatcgcgcctgccgtcctctgctgtgacccctcgggccccgcaccccagtcacacaagccagcccgttgccaagaccacggcagcccccaccacacgtcggccccccaccactgcccccagccgtgtgcccggacgtcggcccccggccccccagcagcctccaaagccctgtgactcacagccctgcttccacggggggacctgccaggactgggcattgggcgggggcttcacctgcagctgcccggcaggcaggggaggcgccgtctgtgagaaggtgcttggcgcccctgtgccggccttcgagggccgctccttcctggccttccccaccctccgcgcctaccacacgctgcgcctggcactggaattccgggcgctggagcctcaggggctgctgctgtacaatggcaacgcccggggcaaggacttcctggcattggcgctgctagatggccgcgtgcagctcaggtttgacacaggttcggggccggcggtgctgaccagtgccgtgccggtagagccgggccagtggcaccgcctggagctgtcccggcactggcgccggggcaccctctcggtggatggtgagacccctgttctgggcgagagtcccagtggcaccgacggcctcaacctggacacagacctctttgtgggcggcgtacccgaggaccaggctgccgtggcgctggagcggaccttcgtgggcgccggcctgagggggtgcatccgtttgctggacgtcaacaaccagcgcctggagcttggcattgggccgggggctgccacccgaggctctggcgtgggcgagtgcggggaccacccctgcctgcccaacccctgccatggcggggccccatgccagaacctggaggctggaaggttccattgccagtgcccgcccggccgcgtcggaccaacctgtgccgatgagaagagcccctgccagcccaacccctgccatggggcggcgccctgccgtgtgctgcccgagggtggtgctcagtgcgagtgccccctggggcgtgagggcaccttctgccagacagcctcggggcaggacggctctgggcccttcctggctgacttcaacggcttctcccacctggagctgagaggcctgcacacctttgcacgggacctgggggagaagatggcgctggaggtcgtgttcctggcacgaggccccagcggcctcctgctctacaacgggcagaagacggacggcaagggggacttcgtgtcgctggcactgcgggaccgccgcctggagttccgctacgacctgggcaagggggcagcggtcatcaggagcagggagccagtcaccctgggagcctggaccagggtctcactggagcgaaacggccgcaagggtgccctgcgtgtgggcgacggcccccgtgtgttgggggagtccccggttccgcacaccgtcctcaacctgaaggagccgctctacgtagggggcgctcccgacttcagcaagctggcccgtgctgctgccgtgtcctctggcttcgacggtgccatccagctggtctccctcggaggccgccagctgctgaccccggagcacgtgctgcggcaggtggacgtcacgtcctttgcaggtcacccctgcacccgggcctcaggccacccctgcctcaatggggcctcctgcgtcccgagggaggctgcctatgtgtgcctgtgtcccgggggattctcaggaccgcactgcgagaaggggctggtggagaagtcagcgggggacgtggataccttggcctttgacgggcggacctttgtcgagtacctcaacgctgtgaccgagagcgagaaggcactgcagagcaaccactttgaactgagcctgcgcactgaggccacgcaggggctggtgctctggagtggcaaggccacggagcgggcagactatgtggcactggccattgtggacgggcacctgcaactgagctacaacctgggctcccagcccgtggtgctgcgttccaccgtgcccgtcaacaccaaccgctggttgcgggtcgtggcacatagggagcagagggaaggttccctgcaggtgggcaatgaggcccctgtgaccggctcctccccgctgggcgccacgcagctggacactgatggagccctgtggcttgggggcctgccggagctgcccgtgggcccagcactgcccaaggcctacggcacaggctttgtgggctgcttgcgggatgtggtggtgggccggcacccgctgcacctgctggaggacgccgtcaccaagccagagctgcggccctgccccaccccatgagctggcaccagagccccgcgcccgctgtaattattttctatttttgtaaacttgttgctttttgatatgattttcttgcctgagtgttggccggagggactgctggcccggcctcccttccgtccaggcagccgtgctgcagacagacctagtgctgagggatggacaggcgaggtggcagcgtggagggctcggcgtggatggcagcctcaggacacacacccctgcctcaaggtgctgagcccccgccttgcactgcgcctgccccacggtgtccccgccgggaagcagccccggctcctgaatcaccctcgctccgtcaggcgggactcgtgtcccaaaaaggaaggggctgctgaggtctgatggggcccttcctccgggtgaccccacagggcctttccaagcccctatttgagctgctccttcctgtgtgtgctctggaccctgcctcggcctcctgcgccaatactgtgacttccaaacaatgttactgctgggcacagctctgcgttgctcccgtgctgcctgcgccagccccaggctgctgaggagcagaggccagaccagggccgatctgggtgtcctgaccctcagctggccctgcccagccaccctggacatgaccgtatccctctgccacaccccaggccctgcgaggggctatcgagaggagctcactgtgggatggggttgacctctgccgcctgcctgggtatctgggcctggccatggctgtgttcttcatgtgttgattttatttgacccctggagtggtgggtctcatctttcccatctcgcctgagagcggctgagggctgcctcactgcaaatcctccccacagcgtcagtgaaagtcgtccttgtctcagaatgaccaggggccagccagtgtctgaccaaggtcaaggggcaggtgcagaggtggcagggatggctccgaagccagaa

SEQ ID NO: 833 - protein, 456 aa, Homo sapiens [sequence omitted]

SEQ ID NO: 834 - DNA, 2162 bp, Homo sapiens
gggctgcgctgtccagctgtggctatggccccagccccgagatgaggagggagagaactaggggcccgcaggcctgggaatttccgtcccccaccaagtccggatgctcactccaaagtctcagcaggcccctgagggagggagctgtcagccagggaaaaccgagaacaccatcaccatgacaaccagtcaccagcctcaggacagatacaaagctgtctggcttatcttcttcatgctgggtctgggaacgctgctcccgtggaattttttcatgacggccactcagtatttcacaaaccgcctggacatgtcccagaatgtgtccttggtcactgctgaactgagcaaggacgcccaggcgtcagccgcccctgcagcacccttgcctgagcggaactctctcagtgccatcttcaacaatgtcatgaccctatgtgccatgctgcccctgctgttattcacctacctcaactccttcctgcatcagaggatcccccagtccgtacggatcctgggcagcctggtggccatcctgctggtgtttctgatcactgccatcctggtgaaggtgcagctggatgctctgcccttctttgtcatcaccatgatcaagatcgtgctcattaattcatttggtgccatcctgcagggcagcctgtttggtctggctggccttctgcctgccagctacacggcccccatcatgagtggccagggcctagcaggcttctttgcctccgtggccatgatctgcgctattgccagtggctcggaactatcagaaagtgccttcggctactttatcacagcctgtgctgttatcattttgaccatcatctgttacctgggcctgccccgcctggaattctaccgctactaccagcagctcaagcttgaaggacccggggagcaggagaccaagttggacctcattagcaaaggagaggagccaagagcaggcaaagaggaatctggagtttcagtctccaactctcagcccaccaatgaaagccactctatcaaagccatcctgaaaaatatctcagtcctggctttctctgtctgcttcatcttcactatcaccattgggatgtttccagccgtgactgttgaggtcaagtccagcatcgcaggcagcagcacctgggaacgttacttcattcctgtgtcctgtttcttgactttcaatatctttgactggttgggccggagcctcacagctgtattcatgtggcctgggaaggacagccgctggctgccaagcctggtgctggcccggctggtgtttgtgccactgctgctgctgtgcaacattaagccccgccgctacctgactgtggtcttcgagcacgatgcctggttcatcttcttcatggctgcctttgccttctccaacggctacctcgccagcctctgcatgtgcttcgggcccaagaaagtgaagccagctgaggcagagaccgcaggagccatcatggccttcttcctgtgtctgggtctggcactgggggctgttttctccttcctgttccgggcaattgtgtgacaaaggatggacagaaggactgcctgcctccctccctgtctgcctcctgccccttccttctgccaggggtgatcctgagtggtctggcggttttttcttctaactgacttctgctttccacggcgtgtgctgggcccggatctccaggccctggggagggagcctctggacggacagtggggacattgtgggtttggggctcagagtcgagggacggggtgtagcctcggcatttgcttgagtttctccactcttggctctgactgatccctgcttgtgcaggccagtggaggctcttgggcttggagaacacgtgtgtctctgtgtatgtgtctgtgtgtctgcgtccgtgtctgtcagactgtctgcctgtcctggggtggctaggagctgggtctgaccgttgtatggtttgacctgatatactccattctcccctgcgcctcctcctctgtgttttttccatgtccccctcccaactccccatgcccagtttttacccatcatgcaccctgtacagttgccacgttactgccttttttaaaaatatatttgacagaaaccaggtgccttcagaggctctctgatttaaataaacctttcttgttttttt

SEQ ID NO: 835 - protein, 479 aa, Homo sapiens
TVTKMSWRPQYRSSKFRNVYGKVANREHCFDGIPITKNVHDNHFCAVNTRFLAIVTESAGGGSFLVIPLEQTGRIEPNYPKVCGHQGNVLDIKWNPFIDNIIASCSEDTSVRIWEIPEGGLKRNMTEALLELHGHSRRVGLVEWHPTTNNILFSAGYDYKVLIWNLDVGEPVKMIDCHTDVILCMSFNTDGSLLTTTCKDKKLRVIEPRSGRVLQEANCKNHRVNRVVFLGNMKRLLTTGVSRWNTRQIALWDQEDLSMPLIEEEIDGLSGLLFPFYDADTHMLYLAGKGDGNIRYYEISTEKPYLSYLMEFRSPAPQKGLGVMPKHGLDVSACEVFRFYKLVTLKGLIEPISMIVPRRSDSYQEDIYPMTPGTEPALTPDEWLGGINRDPVLMSLKEGYKKSSKMVFKAPIKEKKSVVVNGIDLLENVPPRTENELLRMFFRQQDEIRRLKEELAQKDIRIRQLQLELKNLRNSPKNC

SEQ ID NO: 836 - DNA, 3269 bp, Homo sapiens
gactgtcacaaagatgtcctggcgtccgcaataccgtagctccaagttccggaatgtctacgggaaggtggccaaccgggagcactgcttcgatgggatccccatcaccaagaatgtgcacgacaaccacttctgtgccgtcaacacccgcttcctggccatcgtcaccgagagcgcagggggcggctccttcctcgtcatccccctggagcagacaggcaggattgaacccaactaccccaaggtctgcggccaccagggcaatgtgctggatatcaaatggaaccccttcatcgacaacatcattgcctcgtgctcggaggacacgtcggtgcggatctgggagatccccgagggcgggctgaagcggaacatgacggaggcgctcctggagctgcacgggcacagccggcgtgtggggctggtcgagtggcaccccaccaccaacaacatcctgttcagcgctggctacgactacaaggtcctcatctggaacctggatgtgggtgagccggtgaagatgattgactgccacacggatgtgatcctctgcatgtccttcaacacggacggcagcctgctcaccaccacgtgcaaggacaagaagctgcgtgtgattgagccccgctctggccgtgttctgcaggaggccaactgcaaaaaccacagagtgaaccgggtggtgttcctggggaacatgaagcggctcctcacgacaggggtctccaggtggaacacaagacagattgccctctgggaccaggaggacctctccatgcccctgatcgaagaggaaattgatgggctctctggcctcctgttccccttctatgatgctgacacccacatgctctacctggctggaaagggtgatggaaacatccggtactacgagatcagcactgagaagccctacctgagttacctcatggagttccgctccccagccccgcagaaaggcctaggggtcatgcccaagcacgggctggatgtgtcagcctgcgaggtgttccgcttctacaagctggtgactctcaagggcctgatcgagcccatctccatgatcgtgccccggaggtcagattcctaccaggaagacatttacccaatgacaccaggcacggagccagcactgaccccggatgaatggctgggaggcatcaaccgagatcccgtgctgatgtctttgaaagaaggctataagaagtcctcaaaaatggtatttaaggctcccatcaaagaaaagaagagtgttgtggtcaacggaatagatttattagaaaatgtcccacccaggacagagaatgagctccttcgaatgttcttccggcagcaggatgagattcgacggttgaaagaggagctggcccagaaggacatccgcattcggcagctccagctggaactgaaaaacttgcgcaacagccccaagaactgttagctccccagctgggctgttttctaagccgatctctccgtcgtttctactcatcccttaacttctcccttaccagtgaccccagagacagagccaggacaggagtgggggccagcctgaggacccccgcctaccacctcgagaactggaagccaacctctaacctcctgacctcatgctaataaaagtccccagcttctggagaccccctgccggcagcccctttccctgccaccccaggagccaggcttcccctcagctgggtgaagactacagactccctggggttggcaggggctccatctcagtggaccaggaagcaagaggggaagcgggatcccagctagacttagaacttggacttttcccctgtgaagggggctgccaggacatctcagcactcccgcctggagctctcagcatcactgaaggtaccacagtgtaagtgctggactgcaggctgcagtgatccctctttcgtcccaccccctcttccctcagcagccccggaagcctgcctcacccgacgaggacagcgagcggcccggctcctttctgtctcttcccttcccgccctcttgtcttcagggaattcagaggattgctctccaaggccataatgaccccttgccttccccatgattctcttcaaagctcttgcacacccttttcccattcaatttgtgagccaggcagggtagggattagtgtccccctttgacaaatgacagaactgagggttgcaatggggaaatgacttataaagtcacccagcaggtcaacaatgggcccacgaccaagaccctgggtgttcagaccccaaggccagggcctttcccgctgcatcaagatgccaatccctttgtgggcttcaccagtgcccaagtctctatggagaatgagaactggaagccactgctaccgtctacccagcaccagtagtgccgatgtgccacactgcccagttgaggcccctcacgctctgtgcccctagatccttcaggtccccaccctcagctgtcaccaccaccctccccaggggactccatctgagatgaggcctcgtcctcctggaagctgaggctgagaagggtggagcttggccctggggaaggcagaccagggtctgatggcttctagggatgctctgcgtgtgtctcagcaccgctatctcagccactttcagccttatgcacgtagaatgaccacagccactcgcatccgtatagcactttaaagtttctgcagtcctttgacacataggatctcatggagcctcacgtctactcccttctgcagatgaggaaaccgagagaagtggcccaaggtcacgcaactctgagatgccacatttcatttgatcttgtacacattttcttttattccttcttttttcctcctttcatttcccactacgcacaaagagtttataaacactgttctcagaagagtcacagtttggggtgagatctggaaatcaagaaatgggtgtccactcttttctttcattagctaggatctactagatgcattatactccatacctgcttttcccatggccgccctacggaaaatcccatccacagaggccagggctacccaagcccctccaggtgagctgggcctttcctttatgaacctccatcctcccagccagctacagtagggcctcctcaccccgtaccccacagctagacagtgtcagcactcatctcctcctcccacatttctggagcttttttttttccttccccattgacctttgtggtcttctgtgattatttatgctgcctcccaaggatagaattgaaataaaatgttttcaacttat

SEQ ID NO: 837 - protein, 406 aa, Homo sapiens
MAAAAREEEEEAARESAACPAAGPALWRLPEVLLLHMCSYLDMRALGRLAQVYRWLWHFTNCDLLRRQIAWASLNSGFTRLGTNLMTSVPVKVSQNWIVGCCREGILLKWRCSQMPWMQLEDDALYISQANFILAYQFRPDGASLNRQPLGVSAGHDEDVCHFVLATSHIVSAGGDGKIGLGKIHSTFAAKYWAHEQEVNCVDCKGGIISFGSRDRTAKVWPLASGQLGQCLYTIQTEDQIWSVAIRPLLSSFVTGTACCGHFSPLKIWDLNSGQLMTHLDRDFPPRAGVLDVIYESPFALLSCGYDTYVRYWDCRTSVRKCVMEWEEPHNSTLYCLQTDGNHLLATGSSFYSVVRLWDRHQRACPHTFPLTSTRLGSPVYCLHLTTKHLYAALSYNLHVLDIQNP

SEQ ID NO: 838 - DNA, 1590 bp, Homo sapiens
cgagggggaagcgaaggaaggggaagaggaagggaaaagcgagcgagaggggcaaggcggaagaggaagcagggcggaagggaagcccgggccgcagacggcgaaggaggcagcgggccgggggctgaggcgggagcgaggacacgcccaagagaggaagcagagggaggcggaagcgtggaggaaggggcgagaggcatcatcaaaggagatgaggggagcgtaggggccgggaaagaggcacaaggaagaaagtatgggaaggaggaatggagggtcagggctaggcggcgggagggcgccaggccgggaagagtacaaggacaaggaggtcaggtttgggcctacatcccggggacaggggcggccatggcggcggcagccagggaggaggaggaggaggcggctcgggagtcagccgcctgcccggctgcggggccagcgctctggcgcctgccggaagtgctgctgctgcacatgtgctcctacctcgacatgcgggccctcggccgcctggcccaggtgtaccgctggctgtggcacttcaccaactgcgacctgctccggcgccagatagcctgggcctcgctcaactccggcttcacgcggctcggcaccaacctgatgaccagtgtcccagtgaaggtgtctcagaactggatagtggggtgctgccgagaggggattctgctgaagtggagatgcagtcagatgccctggatgcagctagaggatgatgctttgtacatatcccaggctaatttcatcctggcctaccagttccgtccagatggtgccagcttgaaccgtcagcctctgggagtctctgctgggcatgatgaggacgtttgccactttgtgctggccacctcgcatattgtcagtgcaggaggagatgggaagattggccttggtaagattcacagcaccttcgctgccaagtactgggctcatgaacaggaggtgaactgtgtggattgcaaagggggcatcatatcatttggctccagggacaggacggccaaggtgtggcctttggcctcaggccagctggggcagtgtttatacaccatccagactgaagaccaaatctggtctgttgctatcaggccattactcagctcttttgtgacagggacggcttgttgtgggcacttctcacccctgaaaatctgggacctcaacagtgggcagctgatgacacacttggacagagactttcccccaagggctggggtgctggatgtcatatatgagtcccctttcgcactgctctcctgtggctatgacacctatgttcgctactgggactgccgcaccagtgtccggaaatgtgtcatggagtgggaggagccccacaacagcaccctgtactgcctgcagacagatggcaaccacttgcttgccacaggttcctccttctatagcgttgtacggctgtgggaccggcaccaaagggcctgcccgcacaccttcccgctgacgtcgacccgcctcggcagccctgtgtactgcctgcatctcaccaccaagcatctctatgctgcgctgtcttacaacctccacgtcctggatattcaaaacccgtga

SEQ ID NO: 839 - protein, 496 aa, Homo sapiens
MFAKATRNFLREVDADGDLIAVSNLNDSDKLQLLSLVTKKKRFWCWQRPKYQFLSLTLGDVLIEDQFPSPVVVESDFVKYEGKFANHVSGTLETALGKVKLNLGGSSRVESQSSFGTLRKQEVDLQQLIRDSAERTINLRNPVLQQVLEGRNEVLCVLTQKITTMQKCVISEHMQVEEKCGGIVGIQTKTVQVSATEDGNVTKDSNVVLEIPAATTIAYGVIELYVKLDGQFEFCLLRGKQGGFENKKRIDSVYLDPLVFREFAFIDMPDAAHGISSQDGPLSVLKQATLLLERNFHPFAELPEPQQTALSDIFQAVLFDDELLMVLEPVCDDLVSGLSPTVAVLGELKPRQQQDLVAFLQLVGCSLQGGCPGPEDAGSKQLFMTAYFLVSALAEMPDSAAALLGTCCKLQIIPTLCHLLRALSDDGVSDLEDPTLTPLKDTERFGIVQRLFASADISLERLKSSVKAVILKDSKVFPLLLCITLNGLCALGREHS

SEQ ID NO: 840 - DNA, 2230 bp, Homo sapiens
gcagcccactcttcccgagaggccccgacatctcccggataatctggagctttcaaaatgtttgccaaagcaaccaggaattttcttagagaagttgatgctgatggtgacctgattgcagtatcaaatctgaatgactctgataagttacagcttctaagtctggtgacaaaaaagaagagattctggtgctggcagagacccaagtaccagtttttatccctcacccttggcgatgtactcatagaagaccaatttccgagtccagtggtcgtggagtcggactttgtgaaatacgagggcaagtttgcaaaccacgtgagtggaaccctggagactgcactggggaaggtcaagctgaacctggggggcagcagccgcgtagagagccagtcttcatttggaaccctgaggaagcaggaggtggatttgcagcagctcatcagagactctgccgagagaacaataaatctgagaaaccctgtgctccagcaggtgctggaaggaaggaatgaggtcctgtgcgttttgacacagaagatcacgacgatgcagaagtgtgtgatctctgagcacatgcaggtcgaggagaagtgtggtggcatcgtgggcatccagaccaagacggtgcaggtgtcagcgacggaggatgggaatgtcaccaaggactccaacgtggtgctggagatcccagctgccaccaccattgcctacggtgtcattgagttatacgtgaaactggacggccagttcgagttctgccttctccgagggaagcaaggtggcttcgagaacaagaagagaattgactctgtctacctggaccccctggtctttcgagagtttgcattcatagacatgccagatgctgcgcatgggatatcttcccaggatggaccattaagtgttttaaagcaagcgaccctgctcctggagaggaatttccatccatttgcggagctgcctgagccacaacagacagctttgagtgacatcttccaggcggtcctatttgatgatgaactactcatggtcctggaaccagtgtgcgatgacctggtcagcggcctctcgcccacagtggcggtgctgggggagctgaagccccggcagcagcaggaccttgtggccttcctgcagctggtggggtgcagcttacagggtgggtgtccgggccccgaggatgcaggcagcaagcagctgtttatgacagcctacttcttggtcagtgccctcgcagaaatgccagatagcgcggcagctctgctgggcacttgctgcaaactccagatcattcccacactgtgccacttgcttcgtgctctgtctgatgatggagtatctgatcttgaagacccaaccttgactcccctgaaagatacagaaaggtttgggattgtgcagcgcttgtttgcctcagctgacattagtctggagagactgaagtcatctgtgaaagctgtcattctgaaggactctaaagtcttcccactgcttctttgtataaccctgaatggactctgtgctttaggcagagaacattcatgatgtcatatgtgaactagaagtacgtgttactggccaaggctatttttcagaactgttaaaggtcatatgcacgttaaaagttgaccaatgaaatgaatttacagaacagtttaagaagtggtgacattttgcatgatgaatgacctgacttttagccaccaggtactctttaaacagttttccttatcagaggccctcctgtgctggtgacccagcatctgagttaggttccagcatgtaaagagctgggagggcggagaattcttagcatacattcagacgttttttctgcacaataataagtccatctgtcacttgcattccactttttgttacatagaaagagtctgaccctttaatccaaaaggtctttttacattgtgaatgctgtgggaaggcaatttctctgcacacaagaggctacgttttggaagtgatgtatgttatttgatgactgaaaatgaactgtaaatgctcctagagtatattcctctgctgaacaaaattaaacttcaaaaaaatctaacagtaacacacccctgcttgggaccctagctatatgcattttatgtgaccttgccatgcttcagtgaacatactaattctatgtctagcacatgttgatttcctatgtattctgggtattctattaaaggaaactttgaactattaaaaaaaaaaa

SEQ ID NO: 841 - protein, 730 aa, Homo sapiens [sequence omitted]

SEQ ID NO: 842 - DNA, 7280 bp, Homo sapiens
atggaagagttaatagttgaacttcgtctctttcttgaactcctggaccatgaatatctaacctcaactgtcagggagaaaaaggcagtgataaccaacattctgctaagaatacagtcatccaaaggttttgatgtgaaggaccatgctcagaagcaggagaccgctaacagcctgccagcccctcctcagatgcccctgccggagatccctcagccctggctgcctcctgacagtgggcctccaccattgccaacatcctccctcccagaaggttattatgaggaagctgtgccactgagccccggaaaagctccggaatacatcacatcaaattatgattccgatgcgatgagcagctcttatgagtcgtatgatgaagaggaggaggatgggaaggggaagaaaacccggcaccagtggccctccgaggaggcctccatggacctggtcaaggacgccaaaatctgcgccttcctgctgcggaagaagcggttcggccagtggaccaagttgctctgcgtcatcaaagacaccaaactgctgtgctataaaagttccaaggaccagcagcctcagatggaactgctactccaaggctgtaacattacgtacatcccgaaagacagcaaaaagaagaagcacgagctgaagattactcagcaggacacggacccgcttgttctcgccgtccagagcaaggaacaggccgggcagtggctgaaggtgatcaaagaagcctacagtggttgtagtggccccgtggattcagagtgtcctcctccaccaagctccccggtgcacaaggcagaactggagaagaaactgtcttcagagagacccagctcagatggggagggtgttgtggaaaatggaattaccacatgtaatggaaaggagcaagtgaagaggaagaaaagttccaaatcagaggccaagggcactgtgtcgaaagtcactgggaaaaaaatcaccaagatcatcagtctgggaaagaaaaagccgtccacagacgagcagacctcctcagctgaggaagatgttcccacctgcggctatctgaacgtgctctccaacagccgctggcgagagcgctggtgccgagtgaaagataacaagctcattttccacaaggacaggaccgacctgaagacccatattgtgtctattccgctccgtggctgcgaggtgatcccgggtttggattctaaacatcctctgacgttccggctgctgcgcaacggccaggaggttgcagtattggaggcatcttcttctgaagacatgggcaggtggattgggattttactcgcagagacgggatcgtccacagacccggaggctctgcactatgactacattgatgtggagatgtctgcaagtgtcattcagacagccaaacagaccttctgtttcatgaacaggcgtgttatatctgctaacccatatctagggggcacctccaacggctatgcccaccccagcgggacggcacttcattatgacgatgtcccgtgcatcaacggctcgctcaagggtaaaaagccccccgtggcgtctaatggggtcacaggaaaagggaagactctgagcagtcagccaaagaaagcggatcccgcggctgttgtgaaaaggacgggttcgaatgctgcccagtacaagtatggcaagaaccgggtagaagcagatgccaagcggctacagaccaaagaggaggagctgctgaagaggaaagaggccctgcggaataggctggcccagctccgcaaggaaagaaaagaccttcgagcggctattgaagtgaacgccggcaggaagccgcaggcgatcctggaggagaagctgaagcagctggaggaggagtgccggcagaaggaggcggagcgtgtcagcctggagctggagctgacggaggtcaaggagagcctgaagaaagcgctggcgggcggagtcaccctggggctggccatcgagcccaagtcagggacatcgagtccacagtctccagtgttccggcaccggaccctggaaaactcgcccatctccagctgtgacaccagtgacaccgagggccccgtgccggtgaacagcgcggccgtcttgaagaagagccaggctgccccgggcagctccccctgccgagggcatgtgctgcggaaggccaaggaatgggaattgaagaacgggacctaggggacagcagcaccactccagcctcagagactgcacacccccttgcctgtatcctcatctgtgtgacggcaggaagctctgcccagagtggcctcagctgcacgactccagaggctccacgactgagctctgaggccagtgcctgtcccccaggcccacttgtattctttctactgtaaaatggcgcctttaaaaaagatgtaagactttggttcccaactttgttaaaaaacaaaaaaagtgatggaaaggtgtttgaaaggatgctatcaggcgaagtgacatctttctaaccagataggccattgctttcaccgattccaacccagccctggactgaggatggatggttccatgagcccccagatgaaaacctggattcgacagggaagagcttggatccccggctgccccgggcatgagtgtggctggccatgggcactgggctcgccttgcacgcccaccaggagggccaggggcatacgcagtcctgacgtggactttgtgtcttggcgtaccctctccacgtgcccgtccccctcgtcatcagaggtaaaggcatgagaaaatcgcgctgtgaaacgttttttaccttttattattattttttggacagatgcttttgtcaccaagacatgaaaagctgccattcttcttaacctgttttttaagaatgtctttttactgtgtgtcacacttagatcaaggagttttcagaggttccttattttattaattaattatttgtgctgcttttgacaggtagcagagggttttaatacttcactaacagtacaccctcctcccccttgggctagcatccccagcccttaatccacgtcggagccggcaggtgcttctcacaccaggagcctctgggggcaggggctggctcctcgccgctgtacaggacgtttactgctgcttggggccagggcagtcctttgaaagggaagcaagttccggaatttgttccctcatggaactataacaccttagagcaagaggcaggaattccagggcctcctgcccctccccttcctccagcttgtcaagttaaaccactaatgtgttggtgggcctggccgtgctgcctctcctgagtagggtgggtgcaagtagggcctctttcccagctttcttgcttgccttctgtgcaatatttcttggagaatttggatgcctaaggcataaaggaaaaaaacagagttcatagtttgagctggtatttaccccctgggtttaaaaatcagattaacttcttggtctcccggaggctgctgtcaggaattctccagtacgggaagatgcagtcacttatgacgaaataagtcacccctgaacgcctccgcaggcagattcatggagaccagtcccagtagcaaccgccccttccccaagcatagaatacagaggtgccatacttggtgtaagccttccttctgtccactgtccagaatgtcctttttcacacagaggaagagatggcgggaaaacactgactgactccttgggtttcccccagacatactttcagagcgctagctgtgtggtgcacgggactttacagttaggattcatgtttaaggtggtggcgcttgagcccgcaagggccacgttggattactgaagcggaaagcggtctcccatgtataagaaaaagttttacaacacgaattggaagctgcttgagtccacctgaacttgaattgattgcaaagccatctgccgggaacggttttgggttcctgagccatcagccagcctttctttcccctctgatgcacgttcctcccggcctagtccgtggaggcccatcacaccagcatccgtgacgccagcttcccactaggacatccaggcaggtcgggcggggacgccacacgcctcagggccgtccgctgcactgccatagaggagccttccctccagtggtcacttcccaccattgcaggcagacttcccaccattgcaggcagctgggcccacttcatatcacacaaaatgaattttctataaagggaaaaaagtttgctcctccatagatttttgctgccttcgggtcaaatagtttccctggttgacgctcttgggccactctgattggcagcctgctttgccaaagagaactgtgtgaggttttggtggttagtaagagaagggggagatggccagcctgaagtcacggtcctggcccagcacaggtgggcagcagcgagctggcaggtgaagtgtgagcagcacgcaaagtgtcacgtgggccttagccgtcacccaccagcttcctcaccaggcaaggaggccccggagccttagcagggacttgcccgacggcacagctgattggtgctcgactcccagcatgcatattttgttgtaaaaacccaggtttgtaattcacatccacaaccctaagccttttaaagcggaggcaaacgttaacgaaccccatcgtggtccatggagcctttcaaaatgggtgccctggaggggcctgacagtgggttccttccatggcggatactcccttgaaatttcacattccatcaaagtttaaagcatttacttcagaataagttatttatgtgtatatgttcaataaatatagtttttaatttatatctgtacatattagacacacgcgagccatcttgccagaattctgacagtgatgtcattttattcccctcccaaaacatgccccaggaacaagcaccccttgcctctgtggcagctgcgagtgtgtctgatttcataacgaagccaggctgagggcaagaggcccgacaggcaggccagggtccccggagaagccggatttcttcgcaatgtcactggtacttagcagatggtcgtgttcacaggggctagccacctgtactacggtgccgaccgcaatgcgaggaatgtggtggccacgcgatggagctggccggaggacaggtcaggtgagggggccgacccctgcgggctcagggctctttccattctaaccttgagccacagtgtcactcttcagggctctgctcctggctctattttgttaaggtgtcatcagccttcaacctccatttatatatttttataatgttaagccactgaccaactttttcatagaaacaactatcagatttgagggctccctttgtccccctgacctgggcacaggcatgggccatggctccctcttcccagaatctgcggggaactggggcaaggcccatctgtctgcaaggctggtagctctctccctcggcttccagagtccacggcagttgcaaggtaaccagtgtggatctgctgagtcaccccaggcaccagacttaccccaggagcatgggccactgtccatggggccttccttgagaccttcccttggggctggcgggcggcggcttaccagctgggtcagtcccatctcgcccctctgtgcctatgccctggcgttgccaggcttaaccttcccctgtatcttactcatcccagaattattactggccatttctaaatagacaaaaactaccctaaaatgtggagatttactccttttgaaaagtctgtttcaaaaagtgtggcctcagctctggaggccacccccaggaaggagtttgaggttcattgtcattatggccacagtttggtgcttgtgcacgggactcaaagggcagcgtcgaagctggggttaggtgtagggttgtgagcaaagctcccctgtttgtggccacaccttccctttccaaaaaggctattaattctactcacccactatttggggggatgtaaattttgcccacagactttgccacccaggtgaggtgctgtgttcatgcacggaactgatgtcattagacaccatccaaggatgggcagcctgcagtgtggccggcgactgccatccagagaaaaggcaccttgtgccacagggcggggccgacaccctgagctcacaggtggcccctgcattcaggtggatgtccatccttgaaacagcctcttctgggaacacagcactggaggtctccaggcatcagggttggccggcagggtgccctgcagcttacataaaggtcgtggcaatgtttcaatgttaaactaaactattgccttcctcttacttttcctaaaatgattttctaatgggaacagtcacttcaagtccatgacatagtttgaaggaggataattcattttttcctggttgtcactgtcttctttcttatccccttggtgggctgggttcatactgtgaaataaactaaaatgaaaccaaaacgttcctgccgtaaatacgtggcacagcactgcagaaaaagcagtcacctctattcgtgagtccccaagccatagcagggcgtctgtaaaagaagggaaactgcacccaggaagtggtgggcgtcagacgcatcctttcgcccgtagttcatgaaatagttccggctttggtcttccagaaaatctcaacttcaccgtgcacaagtgttaccgggtctttttagtgtagccatggaagatactttcaaaaggacatcttcagatcataagtcttaggaccaaaggtgtttttaatgagataatctttttgattttctaacaagaaaggaaatattcactttacattttaacatcaacttttaagtgatattcagaattaattgaccatggtgatacgttgtaaaatgttttcatattaagaatgtaattatttccttattgtattttttaaaagctaaagtcatatttaaaattctctttgaaagaaacaggcaaagaaacagcaaagatttttttaaattaaatatgttagtagtgcccacttcaaatgactgtaaatatattttcactgtttctcaatgtatttaattcataaagtaaaaattttatgaaaagaaacttgcaaggaaaatcctagttttcagtccactcgccccactttgtagtagcttcactgaatttcctgctttcctggttgaattttctactgtttcacgtggtgtaaccctagactggcgcccttggcgtgcccctttgtgtatgaataaacttctctcccccaaaaaaaaaaaaaaaaaaaaaaaaaaaaaaaaaaa

SEQ ID NO: 843 - protein, 655 aa, Homo sapiens
MGTSPSSSTALASCSRIARRATATMIAGSLLLLGFLSTTTAQPEQKASNLIGTYRHVDRATGQVLTCDKCPAGTYVSEHCTNTSLRVCSSCPVGTFTRHENGIEKCHDCSQPCPWPMIEKLPCAALTDRECTCPPGMFQSNATCAPHTVCPVGWGVRKKGTETEDVRCKQCARGTFSDVPSSVMKCKAYTDCLSQNLVVIKPGTKETDNVCGTLPSFSSSTSPSPGTAIFPRPEHMETHEVPSSTYVPKGMNSTESNSSASVRPKVLSSIQEGTVPDNTSSARGKEDVNKTLPNLQVVNHQQGPHHRHILKLLPSMEATGGEKSSTPIKGPKRGHPRQNLHKHFDINEHLPWMIVLFLLLVLVVIVVCSIRKSSRTLKKGPRQDPSAIVEKAGLKKSMTPTQNREKWIYYCNGHGIDILKLVAAQVGSQWKDIYQFLCNASEREVAAFSNGYTADHERAYAALQHWTIRGPEASLAQLISALRQHRRNDVVEKIRGLMEDTTQLETDKLALPMSPSPLSPSPIPSPNAKLENSALLTVEPSPQDKNKGFFVDESEPLLRCDSTSSGSSALSRNGSFITKEKKDTVLRQVRLDPCDLQPIFDDMLHFLNPEELRVIEEIPQAEDKLDRLFEIIGVKSQEASQTLLDSVYSHLPDLL

SEQ ID NO: 844 - DNA, 3662 bp, Homo sapiens
gccaccacgtgtgtccctgcgcccggtggccaccgactcagtccctcgccgaccagtctgggcagcggaggagggtggttggcagtggctggaagcttcgctatgggaagttgttcctttgctctctcgcgcccagtcctcctccctggttctcctcagccgctgtcggaggagagcacccggagacgcgggctgcagtcgcggcggcttctccccgcctgggcggccgcgccgctgggcaggtgctgagcgcccctagagcctcccttgccgcctccctcctctgcccggccgcagcagtgcacatggggtgttggaggtagatgggctcccggcccgggaggcggcggtggatgcggcgctgggcagaagcagccgccgattccagctgccccgcgcgccccgggcgcccctgcgagtccccggttcagccatggggacctctccgagcagcagcaccgccctcgcctcctgcagccgcatcgcccgccgagccacagccacgatgatcgcgggctcccttctcctgcttggattccttagcaccaccacagctcagccagaacagaaggcctcgaatctcattggcacataccgccatgttgaccgtgccaccggccaggtgctaacctgtgacaagtgtccagcaggaacctatgtctctgagcattgtaccaacacaagcctgcgcgtctgcagcagttgccctgtggggacctttaccaggcatgagaatggcatagagaaatgccatgactgtagtcagccatgcccatggccaatgattgagaaattaccttgtgctgccttgactgaccgagaatgcacttgcccacctggcatgttccagtctaacgctacctgtgccccccatacggtgtgtcctgtgggttggggtgtgcggaagaaagggacagagactgaggatgtgcggtgtaagcagtgtgctcggggtaccttctcagatgtgccttctagtgtgatgaaatgcaaagcatacacagactgtctgagtcagaacctggtggtgatcaagccggggaccaaggagacagacaacgtctgtggcacactcccgtccttctccagctccacctcaccttcccctggcacagccatctttccacgccctgagcacatggaaacccatgaagtcccttcctccacttatgttcccaaaggcatgaactcaacagaatccaactcttctgcctctgttagaccaaaggtactgagtagcatccaggaagggacagtccctgacaacacaagctcagcaagggggaaggaagacgtgaacaagaccctcccaaaccttcaggtagtcaaccaccagcaaggcccccaccacagacacatcctgaagctgctgccgtccatggaggccactgggggcgagaagtccagcacgcccatcaagggccccaagaggggacatcctagacagaacctacacaagcattttgacatcaatgagcatttgccctggatgattgtgcttttcctgctgctggtgcttgtggtgattgtggtgtgcagtatccggaaaagctcgaggactctgaaaaaggggccccggcaggatcccagtgccattgtggaaaaggcagggctgaagaaatccatgactccaacccagaaccgggagaaatggatctactactgcaatggccatggtatcgatatcctgaagcttgtagcagcccaagtgggaagccagtggaaagatatctatcagtttctttgcaatgccagtgagagggaggttgctgctttctccaatgggtacacagccgaccacgagcgggcctacgcagctctgcagcactggaccatccggggccccgaggccagcctcgcccagctaattagcgccctgcgccagcaccggagaaacgatgttgtggagaagattcgtgggctgatggaagacaccacccagctggaaactgacaaactagctctcccgatgagccccagcccgcttagcccgagccccatccccagccccaacgcgaaacttgagaattccgctctcctgacggtggagccttccccacaggacaagaacaagggcttcttcgtggatgagtcggagccccttctccgctgtgactctacatccagcggctcctccgcgctgagcaggaacggttcctttattaccaaagaaaagaaggacacagtgttgcggcaggtacgcctggacccctgtgacttgcagcctatctttgatgacatgctccactttctaaatcctgaggagctgcgggtgattgaagagattccccaggctgaggacaaactagaccggctattcgaaattattggagtcaagagccaggaagccagccagaccctcctggactctgtttatagccatcttcctgacctgctgtagaacatagggatactgcattctggaaattactcaatttagtggcagggtggttttttaattttcttctgtttctgatttttgttgtttggggtgtgtgtgtgtgtttgtgtgtgtgtgtgtgtgtgtgtgtgtgtgtgtgtttaacagagaatatggccagtgcttgagttctttctccttctctctctctcttttttttttaaataactcttctgggaagttggtttataagcctttgccaggtgtaactgttgtgaaatacccaccactaaagttttttaagttccatattttctccattttgccttcttatgtattttcaagattattctgtgcactttaaatttacttaacttaccataaatgcagtgtgacttttcccacacactggattgtgaggctcttaacttcttaaaagtataatggcatcttgtgaatcctataagcagtctttatgtctcttaacattcacacctactttttaaaaacaaatattattactatttttattattgtttgtcctttataaattttcttaaagattaagaaaatttaagaccccattgagttactgtaatgcaattcaactttgagttatcttttaaatatgtcttgtatagttcatattcatggctgaaacttgaccacactattgctgattgtatggttttcacctggacaccgtgtagaatgcttgattacttgtactcttcttatgctaatatgctctgggctggagaaatgaaatcctcaagccatcaggatttgctatttaagtggcttgacaactgggccaccaaagaacttgaacttcaccttttaggatttgagctgttctggaacacattgctgcactttggaaagtcaaaatcaagtgccagtggcgccctttccatagagaatttgcccagctttgctttaaaagatgtcttgttttttatatacacataatcaataggtccaatctgctctcaaggccttggtcctggtgggattccttcaccaattactttaattaaaaatggctgcaactgtaagaacccttgtctgatatatttgcaactatgctcccatttacaaatgtaccttctaatgctcagttgccaggttccaatgcaaaggtggcgtggactccctttgtgtgggtggggtttgtgggtagtggtgaaggaccgatatcagaaaaatgccttcaagtgtactaatttattaataaacattaggtgtttgttaaaaaaaaaaaaaaaaaaaaaaaaaaaaa

SEQ ID NO: 845 - protein, 431 aa, Homo sapiens
MTVKTEAAKGTLTYSRMRGMVAILIAFMKQRRMGLNDFIQKIANNSYACKHPEVQSILKISQPQEPELMNANPSPPPSPSQQINLGPSSNPHAKPSDFHFLKVIGKGSFGKVLLARHKAEEVFYAVKVLQKKAILKKKEEKHIMSERNVLLKNVKHPFLVGLHFSFQTADKLYFVLDYINGGELFYHLQRERCFLEPRARFYAAEIASALGYLHSLNIVYRDLKPENILLDSQGHIVLTDFGLCKENIEHNSTTSTFCGTPEYLAPEVLHKQPYDRTVDWWCLGAVLYEMLYGLPPFYSRNTAEMYDNILNKPLQLKPNITNSARHLLEGLLQKDRTKRLGAKDDFMEIKSHVFFSLINWDDLINKKITPPFNPNVSGPNDLRHFDPEFTEEPVPNSIGKSPDSVLVTASVKEAAEAFLGFSYAPPTDSFL

SEQ ID NO: 846 - DNA, 2386 bp, Homo sapiens
agcatacgccgagccggtctttgagcgctaacgtctttctgtctccccgcggtggtgatgacggtgaaaactgaggctgctaagggcaccctcacttactccaggatgaggggcatggtggcaattctcatcgctttcatgaagcagaggaggatgggtctgaacgactttattcagaagattgccaataactcctatgcatgcaaacaccctgaagttcagtccatcttgaagatctcccaacctcaggagcctgagcttatgaatgccaacccttctcctccaccaagtccttctcagcaaatcaaccttggcccgtcgtccaatcctcatgctaaaccatctgactttcacttcttgaaagtgatcggaaagggcagttttggaaaggttcttctagcaagacacaaggcagaagaagtgttctatgcagtcaaagttttacagaagaaagcaatcctgaaaaagaaagaggagaagcatattatgtcggagcggaatgttctgttgaagaatgtgaagcaccctttcctggtgggccttcacttctctttccagactgctgacaaattgtactttgtcctagactacattaatggtggagagttgttctaccatctccagagggaacgctgcttcctggaaccacgggctcgtttctatgctgctgaaatagccagtgccttgggctacctgcattcactgaacatcgtttatagagacttaaaaccagagaatattttgctagattcacagggacacattgtccttactgacttcggactctgcaaggagaacattgaacacaacagcacaacatccaccttctgtggcacgccggagtatctcgcacctgaggtgcttcataagcagccttatgacaggactgtggactggtggtgcctgggagctgtcttgtatgagatgctgtatggcctgccgcctttttatagccgaaacacagctgaaatgtacgacaacattctgaacaagcctctccagctgaaaccaaatattacaaattccgcaagacacctcctggagggcctcctgcagaaggacaggacaaagcggctcggggccaaggatgacttcatggagattaagagtcatgtcttcttctccttaattaactgggatgatctcattaataagaagattactcccccttttaacccaaatgtgagtgggcccaacgacctacggcactttgaccccgagtttaccgaagagcctgtccccaactccattggcaagtcccctgacagcgtcctcgtcacagccagcgtcaaggaagctgccgaggctttcctaggcttttcctatgcgcctcccacggactctttcctctgaaccctgttagggcttggttttaaaggattttatgtgtgtttccgaatgttttagttagccttttggtggagccgccagctgacaggacatcttacaagagaatttgcacatctctggaagcttagcaatcttattgcacactgttcgctggaagctttttgaagagcacattctcctcagtgagctcatgaggttttcatttttattcttccttccaacgtggtgctatctctgaaacgagcgttagagtgccgccttagacggaggcaggagtttcgttagaaagcggacgctgttctaaaaaaggtctcctgcagatctgtctgggctgtgatgacgaatattatgaaatgtgccttttctgaagagattgtgttagctccaaagcttttcctatcgcagtgtttcagttctttattttcccttgtggatatgctgtgtgaaccgtcgtgtgagtgtggtatgcctgatcacagatggattttgttataagcatcaatgtgacacttgcaggacactacaacgtgggacattgtttgtttcttccatatttggaagataaatttatgtgtagacttttttgtaagatacggttaataactaaaatttattgaaatggtcttgcaatgactcgtattcagatgcttaaagaaagcattgctgctacaaatatttctatttttagaaagggtttttatggaccaatgccccagttgtcagtcagagccgttggtgtttttcattgtttaaaatgtcacctgtaaaatgggcattatttatgtttttttttttgcattcctgataattgtatgtattgtataaagaacgtctgtacattgggttataacactagtatatttaaacttacaggcttatttgtaatgtaaaccaccattttaatgtactgtaattaacatggttataatacgtacaatccttccctcatcccatcacacaactttttttgtgtgtgataaactgattttggtttgcaataaaaccttgaaaaatatttacaaaaaaaaaaaaaaaa

SEQ ID NO: 847 - protein, 302 aa, Homo sapiens
MHYPTALLFLILANGAQAFRICAFNAQRLTLAKVAREQVMDTLVRILARCDIMVLQEVVDSSGSAIPLLLRELNRFDGSGPYSTLSSPQLGRSTYMETYVYFYRSHKTQVLSSYVYNDEDDVFAREPFVAQFSLPSNVLPSLVLVPLHTTPKAVEKELNALYDVFLEVSQHWQSKDVILLGDFNADCASLTKKRLDKLELRTEPGFHWVIADGEDTTVRASTHCTYDRVVLHGERCRSLLHTAAAFDFPTSFQLTEEEALNISDHYPVEVELKLSQAHSVQPLSLTVLLLLSLLSPQLCPAA

SEQ ID NO: 848 - DNA, 2661 bp, Homo sapiens
cttgaacgcctgacctcgtatccacccgcctcagcctcccaaagtgctgggattacaggcatgagccaccacgcccagcccataatttattgattttttaaaatttgtccagccttctattaccacgtcgaatccattagctacagccatcccatgagaagctgagtggattcagccccacctcctgctcacagaccctgtccgagcacctcatttgtcccaacagcattactgcaggacccccaggacgttggactgccagctccctgggtctcctcctctctggggcagatcctcagtcctcccttgacttcacgactgtggccagatcatgtgtggactgtccctctctttgggtctccagagcgcttgcatcaaacacccctaactcagaagtgtgcagccacactgggactcagaacccaacaacagggacagaagactcacgcccttggggtgcccggtctcgtggcatcaggcatgacttccagctcctgcgccttccccagcaactgctgactggggacccagaccgggagctgagcgacgggcctggcgagcgaagctcggggtctcactcaggcaccagcccctccttgccccaggcttgagtgactcacagccctattcaggcaggagctgctcttctggggtatcgcgatccacttaaggatgaggcagacttggtgacaagctggtctgagcagcgcttccagagccagaactgagcccagtgagagcgcaccctggagcagcctggattcctggggtgtccccggcagccacacacagccatgcactacccaactgcactcctcttcctcatcctggccaatggggcccaggcctttcgcatctgcgccttcaatgcccagcggctgacactggccaaggtggccagggagcaggtgatggacaccttagttcggatactggctcgctgtgacatcatggtgctgcaggaggtggtagactcttccggcagcgccatccccctcctgcttcgagaactcaatcgatttgatggctctgggccctacagcaccctgagcagcccccagctggggcgcagcacctacatggagacgtatgtgtacttctatcggtcacacaaaacacaggtcctgagttcctacgtgtacaacgatgaggatgacgtctttgcccgggagccatttgtggcccagttctctttgcccagcaatgtccttcccagcctggtgttggtcccgctgcacaccactcctaaggccgtagagaaggagctgaacgccctctacgatgtgtttctggaggtctcccagcactggcagagcaaggacgtgatcctgcttggggacttcaatgctgactgcgcttcactgaccaaaaagcgcctggacaagctggagctgcggactgagccaggcttccactgggtgattgccgatggggaggacaccacagtgcgggccagcacccactgcacctatgaccgcgtcgtgctgcacggggagcgctgccggagtctgctgcacactgcggctgcctttgacttccccacgagcttccagctcaccgaggaggaggccctcaacatcagtgaccactaccccgtggaggtggagctgaagctgagccaggcgcacagcgtccagcctctcagcctcactgttctgttgctgctatcactcctgtcccctcagctgtgccctgctgcctgagcgtccccctacccccccagggcctgctgccttttgggacttaaaccccagcctcccccgtccatccagccctggggctggggggcttcaactatagttgccctgtgactgtagtccacccctgcctgccttgtttgatttggctcttgttctttggttgggcttgtgcctagattaggagaggaagccaggggccctgcactcatgccacctgccaggtagtgtagtatcaggagtggagacaaagtgggctctgggttggggtaggggaagggagggttcagaaagaggaatgaagatgttgtatgacaagaaggaaagttactgagaacaaaaacccagattggtgagataggacacttgtgcagcagatatgccaatgggccatgtttattgtggatgggtaagaatcaccaggaaaccattaagccccaatagctacaaggagggtggttaatctgctatatcaaactccttccctgaaaccagcaaacaccgggaaacattttggctcattataatccggtgaacaatgcagtcaggcctgttataaccgctgagcagccacactcgcacctcctgggtgctgtagtctgtgttggtacaggcttctgcatgcctggtaaagtccagccaaggctggtcaaggcaacatctccacacagaaaatctgcaccagttatgtaagctaaaaagctgtgtgaacccaggtgtcccggaaaggggctgcaggacacagcaaaatgccagcagcgtgccggacccctcccttccatcctcctctccaaagaacagaggtcaggaaaaacactggctgggacgctagaagggtcatgtgttaactataatcacatttatggtttggaaccatcaccccaaggtaaaaaaaaaaataaaaggtatgtttggcaaaataaaataaaggtaattaaaaacctaaaaaaaaaaaaaaaaaaaa

SEQ ID NO: 849 - protein, 445 aa, Homo sapiens
MGGVGEPGPREGPAQPGAPLPTFCWEQIRAHDQPGDKWLVIERRVYDISRWAQRHPGGSRLIGHHGAEDATDAFRAFHQDLNFVRKFLQPLLIGELAPEEPSQDGPLNAQLVEDFRALHQAAEDMKLFDASPTFFAFLLGHILAMEVLAWLLIYLLGPGWVPSALAAFILAISQAQSWCLQHDLGHASIFKKSWWNHVAQKFVMGQLKGFSAHWWNFRHFQHHAKPNIFHKDPDVTVAPVFLLGESSVEYGKKKRRYLPYNQQHLYFFLIGPPLLTLVNFEVENLAYMLVCMQWADLLWAASFYARFFLSYLPFYGVPGVLLFFVAVRVLESHWFVWITQMNHIPKEIGHEKHRDWVSSQLAATCNVEPSLFTNWFSGHLNFQIEHHLFPRMPRHNYSRVAPLVKSLCAKHGLSYEVKPFLTALVDIVRSLKKSGDIWLDAYLHQ

SEQ ID NO: 850 - DNA, 1816 bp, Homo sapiens
ggcacgaggcgcacgctcgctcgtacggcggccgcggcggcagggcggggccggagcagcgggcggcggcggaggcggcgcccgggagcgctcttcgcttccctcggggtcttgctcggacctcggccaccgcctgggatccccaggactcgtgcgtgcagcatgggcggcgtcggggagccgggaccgcgggagggacccgcgcagccgggggcaccgctgcccaccttctgctgggagcagatccgcgcgcacgaccagcccggcgacaagtggctggtcatcgagcgccgcgtctacgacatcagccgctgggcacagcggcacccagggggcagccgcctcatcggccaccacggcgctgaggacgccacggatgccttccgtgccttccatcaagatctcaattttgtgcgcaagttcctacagcccctgttgattggagagctggctccggaagaacccagccaggatggacccctgaatgcgcagctggtcgaggacttccgagccctgcaccaggcagccgaggacatgaagctgtttgatgccagtcccaccttctttgctttcctactgggccacatcctggccatggaggtgctggcctggctccttatctacctcctgggtcctggctgggtgcccagtgccctggccgccttcatcctggccatctctcaggctcagtcctggtgtctgcagcatgacctgggccatgcctccatcttcaagaagtcctggtggaaccacgtggcccagaagttcgtgatggggcagctaaagggcttctccgcccactggtggaacttccgccacttccagcaccacgccaagcccaacatcttccacaaagacccagacgtgacggtggcgcccgtcttcctcctgggggagtcatccgtcgagtatggcaagaagaaacgcagatacctaccctacaaccagcagcacctgtacttcttcctgatcggcccgccgctgctcaccctggtgaactttgaagtggaaaatctggcgtacatgctggtgtgcatgcagtgggcggatttgctctgggccgccagcttctatgcccgcttcttcttatcctacctccccttctacggcgtccctggggtgctgctcttctttgttgctgtcagggtcctggaaagccactggttcgtgtggatcacacagatgaaccacatccccaaggagatcggccacgagaagcaccgggactgggtcagctctcagctggcagccacctgcaacgtggagccctcacttttcaccaactggttcagcgggcacctcaacttccagatcgagcaccacctcttccccaggatgccgagacacaactacagccgggtggccccgctggtcaagtcgctgtgtgccaagcacggcctcagctacgaagtgaagcccttcctcaccgcgctggtggacatcgtcaggtccctgaagaagtctggtgacatctggctggacgcctacctccatcagtgaaggcaacacccaggcgggcagagaagggctcagggcaccagcaaccaagccagcccccggcgggatcgatacccccacccctccactggccagcctgggggtgccctgcctgccctcctggtactgttgtcttcccctcggccccctcacatgtgtattcagcagccctatggccttggctctgggcctgatgggacaggggtagagggaaggtgagcatagcacattttcctagagcgagaattgggggaaagctgttatttttatattaaaatacattcagatgtaaaaaaaaaaaaaaaaaaaaaaaaaaaaa

SEQ ID NO: 851 - protein, 353 aa, Homo sapiens
RRPRLSWPSEAHEEARPNAGAWSIEAGPSRDSRAWPDAGNHTLAQTASPDGTEPGHSPGCKNSAGVSTPTSGSMCPPQAQAEVGPTMTEKAEMVCAPSPAPAPPPKPASPGPPQVEEVGHRGGSSPPRLPPGVPVISLGHSRPPGVAMPTTELGTLRPPLLQLSTLGTAPPTLALHYHPHPFLNSVYIGPAGPFSIFPSSRLKRRPSHCELDLAEGHQPQKVARRVFTNSRERWRQQNVNGAFAELRKLLPTHPPDRKLSKNEVLRLAMKYIGFLVRLLRDQAAALAAGPTPPGPRKRPVHRVPDDGPRRGSGRRAEAAARSQPAPPADPDGSPGGAARPIKMEQTALSPEVR

SEQ ID NO: 852 - DNA, 1348 bp, Homo sapiens
cggagacctcggctatcctggccttccgaggcccacgaggaggcgcggcccaacgccggggcctggagcattgaggccggaccctcgcgagacagcagagcctggcctgacgctggaaaccacaccctggcccagactgccagccctgacgggacagagccagggcactcaccaggctgcaagaacagtgctggggtgagtacccccacgtcggggtccatgtgcccgcctcaggcacaggcagaggtgggccccaccatgactgagaaggcagagatggtgtgtgcccccagcccagcgcctgccccaccccctaagcctgcctcgcctgggcccccgcaggtggaggaggtgggccaccgaggaggctcctcgccccccaggctgccacctggtgtaccagtgatcagcctgggccacagcaggcccccaggggtagccatgcccaccacagagctgggcactctgcggcccccgctgctgcaactctccaccctgggaactgccccgcccactttggccctgcactaccaccctcaccccttcctcaacagtgtctacattgggccagcaggaccttttagcatcttccctagcagccggttgaagcggagaccaagccactgtgagctggacctggctgaggggcaccagccccagaaggtggcccggcgcgtgttcaccaacagccgggagcgctggcggcagcagaacgttaacggcgccttcgccgagctgaggaagctgctgccgacgcacccgcccgaccggaagctgagcaagaacgaggtgctccgcctagccatgaagtacatcggcttcctggtgcggctgctgcgcgaccaagccgcagctctggccgcaggccccacccctcccgggcctcgcaaacggccggtgcaccgggtcccagacgacggcccccgccggggatccggacgcagggccgaggcggcagcgcgctcgcagcccgcgcccccggccgaccccgacggcagccccggtggagcggcccggcccatcaagatggagcaaaccgctttgagcccagaggtgcggtgaccgcacgcggcagcacctctgagccggagggcaccagggactcggcccagggccgtcaaggaaagggcagtggacgtgctgcgcatgttcgggagcgaactcccccgaagaaggaccagtgaagacgtcaggggcaaggtctcgggggtccggaagggtgatcatcgacccccaagggacccgcagacccttaaaaaaatcacccacaaccctctggaagtggccttgcccggtccccttcccaggggcgaggtcggcaaagcaacatggcagagcagtcatagga

SEQ ID NO: 853 - protein, 1531 aa, Homo sapiens
MALRGFCSADGSDPLWDWNVTWNTSNPDFTKCFQNTVLVWVPCFYLWACFPFYFLYLSRHDRGYIQMTPLNKTKTALGFLLWIVCWADLFYSFWERSRGIFLAPVFLVSPTLLGITTLLATFLIQLERRKGVQSSGIMLTFWLVALVCALAILRSKIMTALKEDAQVDLFRDITFYVYFSLLLIQLVLSCFSDRSPLFSETIHDPNPCPESSASFLSRITFWWITGLIVRGYRQPLEGSDLWSLNKEDTSEQVVPVLVKNWKKECAKTRKQPVKVVYSSKDPAQPKESSKVDANEEVEALIVKSPQKEWNPSLFKVLYKTFGPYFLMSFFFKAIHDLMMFSGPQILKLLIKFVNDTKAPDWQGYFYTVLLFVTACLQTLVLHQYFHICFVSGMRIKTAVIGAVYRKALVITNSARKSSTVGEIVNLMSVDAQRFMDLATYINMIWSAPLQVILALYLLWLNLGPSVLAGVAVMVLMVPVNAVMAMKTKTYQVAHMKSKDNRIKLMNEILNGIKVLKLYAWELAFKDKVLAIRQEELKVLKKSAYLSAVGTFTWVCTPFLVALCTFAVYVTIDENNILDAQTAFVSLALFNILRFPLNILPMVISSIVQASVSLKRLRIFLSHEELEPDSIERRPVKDGGGTNSITVRNATFTWARSDPPTLNGITFSIPEGALVAVVGQVGCGKSSLLSALLAEMDKVEGHVAIKGSVAYVPQQAWIQNDSLRENILFGCQLEEPYYRSVIQACALLPDLEILPSGDRTEIGEKGVNLSGGQKQRVSLARAVYSNADIYLFDDPLSAVDAHVGKHIFENVIGPKGMLKNKTRILVTHSMSYLPQVDVIIVMSGGKISEMGSYQELLARDGAFAEFLRTYASTEQEQDAEENGVTGVSGPGKEAKQMENGMLVTDSAGKQLQRQLSSSSSYSGDISRHHNSTAELQKAEAKKEETWKLMEADKAQTGQVKLSVYWDYMKAIGLFISFLSIFLFMCNHVSALASNYWLSLWTDDPIVNGTQEHTKVRLSVYGALGISQGIAVFGYSMAVSIGGILASRCLHVDLLHSILRSPMSFFERTPSGNLVNRFSKELDTVDSMIPEVIKMFMGSLFNVIGACIVILLATPIAAIIIPPLGLIYFFVQRFYVASSRQLKRLESVSRSPVYSHFNETLLGVSVIRAFEEQERFIHQSDLKVDENQKAYYPSIVANRWLAVRLECVGNCIVLFAALFAVISRHSLSAGLVGLSVSYSLQVTTYLNWLVRMSSEMETNIVAVERLKEYSETEKEAPWQIQETAPPSSWPQVGRVEFRNYCLRYREDLDFVLRHINVTINGGEKVGIVGRTGAGKSSLTLGLFRINESAEGEIIIDGINIAKIGLHDLRFKITIIPQDPVLFSGSLRMNLDPFSQYSDEEVWTSLELAHLKDFVSALPDKLDHECAEGGENLSVGQRQLVCLARALLRKTKILVLDEATAAVDLETDDLIQSTIRTQFEDCTVLTIAHRLNTIMDYTRVIVLDKGEIQEYGAPSDLLQQRGLFYSMAKDAGLV

SEQ ID NO: 854 - DNA, 5927 bp, Homo sapiens
ccaggcggcgttgcggccccggccccggctccctgcgccgccgccgccgccgccgccgccgccgccgccgccgccgccagcgctagcgccagcagccgggcccgatcacccgccgcccggtgcccgccgccgcccgcgccagcaaccgggcccgatcacccgccgcccggtgcccgccgccgcccgcgccaccggcatggcgctccggggcttctgcagcgccgatggctccgacccgctctgggactggaatgtcacgtggaataccagcaaccccgacttcaccaagtgctttcagaacacggtcctcgtgtgggtgccttgtttttacctctgggcctgtttccccttctacttcctctatctctcccgacatgaccgaggctacattcagatgacacctctcaacaaaaccaaaactgccttgggatttttgctgtggatcgtctgctgggcagacctcttctactctttctgggaaagaagtcggggcatattcctggccccagtgtttctggtcagcccaactctcttgggcatcaccacgctgcttgctacctttttaattcagctggagaggaggaagggagttcagtcttcagggatcatgctcactttctggctggtagccctagtgtgtgccctagccatcctgagatccaaaattatgacagccttaaaagaggatgcccaggtggacctgtttcgtgacatcactttctacgtctacttttccctcttactcattcagctcgtcttgtcctgtttctcagatcgctcacccctgttctcggaaaccatccacgaccctaatccctgcccagagtccagcgcttccttcctgtcgaggatcaccttctggtggatcacagggttgattgtccggggctaccgccagcccctggagggcagtgacctctggtccttaaacaaggaggacacgtcggaacaagtcgtgcctgttttggtaaagaactggaagaaggaatgcgccaagactaggaagcagccggtgaaggttgtgtactcctccaaggatcctgcccagccgaaagagagttccaaggtggatgcgaatgaggaggtggaggctttgatcgtcaagtccccacagaaggagtggaacccctctctgtttaaggtgttatacaagacctttgggccctacttcctcatgagcttcttcttcaaggccatccacgacctgatgatgttttccgggccgcagatcttaaagttgctcatcaagttcgtgaatgacacgaaggccccagactggcagggctacttctacaccgtgctgctgtttgtcactgcctgcctgcagaccctcgtgctgcaccagtacttccacatctgcttcgtcagtggcatgaggatcaagaccgctgtcattggggctgtctatcggaaggccctggtgatcaccaattcagccagaaaatcctccacggtcggggagattgtcaacctcatgtctgtggacgctcagaggttcatggacttggccacgtacattaacatgatctggtcagcccccctgcaagtcatccttgctctctacctcctgtggctgaatctgggcccttccgtcctggctggagtggcggtgatggtcctcatggtgcccgtcaatgctgtgatggcgatgaagaccaagacgtatcaggtggcccacatgaagagcaaagacaatcggatcaagctgatgaacgaaattctcaatgggatcaaagtgctaaagctttatgcctgggagctggcattcaaggacaaggtgctggccatcaggcaggaggagctgaaggtgctgaagaagtctgcctacctgtcagccgtgggcaccttcacctgggtctgcacgccctttctggtggccttgtgcacatttgccgtctacgtgaccattgacgagaacaacatcctggatgcccagacagccttcgtgtctttggccttgttcaacatcctccggtttcccctgaacattctccccatggtcatcagcagcatcgtgcaggcgagtgtctccctcaaacgcctgaggatctttctctcccatgaggagctggaacctgacagcatcgagcgacggcctgtcaaagacggcgggggcacgaacagcatcaccgtgaggaatgccacattcacctgggccaggagcgaccctcccacactgaatggcatcaccttctccatccccgaaggtgctttggtggccgtggtgggccaggtgggctgcggaaagtcgtccctgctctcagccctcttggctgagatggacaaagtggaggggcacgtggctatcaagggctccgtggcctatgtgccacagcaggcctggattcagaatgattctctccgagaaaacatcctttttggatgtcagctggaggaaccatattacaggtccgtgatacaggcctgtgccctcctcccagacctggaaatcctgcccagtggggatcggacagagattggcgagaagggcgtgaacctgtctgggggccagaagcagcgcgtgagcctggcccgggccgtgtactccaacgctgacatttacctcttcgatgatcccctctcagcagtggatgcccatgtgggaaaacacatctttgaaaatgtgattggccccaaggggatgctgaagaacaagacgcggatcttggtcacgcacagcatgagctacttgccgcaggtggacgtcatcatcgtcatgagtggcggcaagatctctgagatgggctcctaccaggagctgctggctcgagacggcgccttcgctgagttcctgcgtacctatgccagcacagagcaggagcaggatgcagaggagaacggggtcacgggcgtcagcggtccagggaaggaagcaaagcaaatggagaatggcatgctggtgacggacagtgcagggaagcaactgcagagacagctcagcagctcctcctcctatagtggggacatcagcaggcaccacaacagcaccgcagaactgcagaaagctgaggccaagaaggaggagacctggaagctgatggaggctgacaaggcgcagacagggcaggtcaagctttccgtgtactgggactacatgaaggccatcggactcttcatctccttcctcagcatcttccttttcatgtgtaaccatgtgtccgcgctggcttccaactattggctcagcctctggactgatgaccccatcgtcaacgggactcaggagcacacgaaagtccggctgagcgtctatggagccctgggcatttcacaagggatcgccgtgtttggctactccatggccgtgtccatcggggggatcttggcttcccgctgtctgcacgtggacctgctgcacagcatcctgcggtcacccatgagcttctttgagcggacccccagtgggaacctggtgaaccgcttctccaaggagctggacacagtggactccatgatcccggaggtcatcaagatgttcatgggctccctgttcaacgtcattggtgcctgcatcgttatcctgctggccacgcccatcgccgccatcatcatcccgccccttggcctcatctacttcttcgtccagaggttctacgtggcttcctcccggcagctgaagcgcctcgagtcggtcagccgctccccggtctattcccatttcaacgagaccttgctgggggtcagcgtcattcgagccttcgaggagcaggagcgcttcatccaccagagtgacctgaaggtggacgagaaccagaaggcctattaccccagcatcgtggccaacaggtggctggccgtgcggctggagtgtgtgggcaactgcatcgttctgtttgctgccctgtttgcggtgatctccaggcacagcctcagtgctggcttggtgggcctctcagtgtcttactcattgcaggtcaccacgtacttgaactggctggttcggatgtcatctgaaatggaaaccaacatcgtggccgtggagaggctcaaggagtattcagagactgagaaggaggcgccctggcaaatccaggagacagctccgcccagcagctggccccaggtgggccgagtggaattccggaactactgcctgcgctaccgagaggacctggacttcgttctcaggcacatcaatgtcacgatcaatgggggagaaaaggtcggcatcgtggggcggacgggagctgggaagtcgtccctgaccctgggcttatttcggatcaacgagtctgccgaaggagagatcatcatcgatggcatcaacatcgccaagatcggcctgcacgacctccgcttcaagatcaccatcatcccccaggaccctgttttgttttcgggttccctccgaatgaacctggacccattcagccagtactcggatgaagaagtctggacgtccctggagctggcccacctgaaggacttcgtgtcagcccttcctgacaagctagaccatgaatgtgcagaaggcggggagaacctcagtgtcgggcagcgccagcttgtgtgcctagcccgggccctgctgaggaagacgaagatccttgtgttggatgaggccacggcagccgtggacctggaaacggacgacctcatccagtccaccatccggacacagttcgaggactgcaccgtcctcaccatcgcccaccggctcaacaccatcatggactacacaagggtgatcgtcttggacaaaggagaaatccaggagtacggcgccccatcggacctcctgcagcagagaggtcttttctacagcatggccaaagacgccggcttggtgtgagccccagagctggcatatctggtcagaactgcagggcctatatgccagcgcccagggaggagtcagtacccctggtaaaccaagcctcccacactgaaaccaaaacataaaaaccaaacccagacaaccaaaacatattcaaagcagcagccaccgccatccggtcccctgcctggaactggctgtgaagacccaggagagacagagatgcgaaccacccaaaacacgcacaccctgcccctggtgccctgagacagacacacagcctcacgcccccaggaatgcaagtggtttcctggtgcttcccacggaggagttttggcagccagacttctggaggaattggttgtatagaagatcctagtgaccaaattcagcctactgcctcggatctctccagccgaagtctgtggactgcaagtctttgagatgcttctggctcccatcacctctaacatccttgtctgggtctaccaggaacgcttcatttccttggggctgcagttttgtggttgaggggcctggagaaaatcattttctccccttggcagtgtcccagggccctggatggtcctcttaccaacatctggtcttccaggcactcaaaagctgggaaccagcatctcagcgccagctctaccagttctcgttttgggccagaggcagcctctgcactcccacgcctgtcctcctggaagggacctggttggactaacggctaacctggacctggaactgtagggccaggggattgtctcagggccgacgttccacctggggcttccctccccacccaccccgactccaggctttcccttttttcttttgttcaacattgtaagaacaatcaatgctgttattactgatcccaccatgattgatgtggggtaaatattaaggagatggcctcatgggaatttgaccttgactagaaatagagactgagagtgagcaaccagctggaaggtactatgccagtcctagcagaaaaatgtgttaggggcctggcccaaagcagtgttggttgcttacagtgttgattgattttgttcttttttcttaccacctcttttctttccctctcatggtacctgctcatggttatgaagctttcaaagtaaagaacacgaaatac

SEQ ID NO: 855 - protein, 128 aa, Homo sapiens
MGIQGGSVLFGLLLVLAVFCHSGHSLQCYNCPNPTADCKTAVNCSSDFDACLITKAGLQVYNKCWKFEHCNFNDVTTRLRENELTYYCCKKDLCNFNEQLENGGTSLSEKTVLLLVTPFLAAAWSLHP

SEQ ID NO: 856 - DNA, 2108 bp, Homo sapiens
tgttcctcctccgtcccacccccataactatactggctctgatgagaccttggttttctgtaaaagctctatttagaggtgtatcattatttacttaattgttctcctttacaacccacctgggatgagcatcttgcctagaagtctctacttgcacaggatacatacgaaatagattgaggattcaaagcagatacagaactcttcccacttactttcttaccctgtgtgtctccccacagggttacaagtgtataacaagtgttggaagtttgagcattgcaatttcaacgacgtcacaacccgcttgagggaaaatgagctaacgtactactgctgcaagaaggacctgtgtaactttaacgaacagcttgaaaatggtgggacatccttatcagagaaaacagttcttctgctggtgactccatttctggcagcagcctggagccttcatccctaagtcaacaccaggagagcttctcccaaactccccgttcctgcgtagtccgctttctcttgctgccacattctaaaggcttgatattttccaaatggatcctgttgggaaagaataaaattagcttgagcaacctggctaagatagaggggctctgggagactttgaagaccagtcctgtttgcagggaagccccacttgaaggaagaagtctaagagtgaagtaggtgtgacttgaactagattgcatgcttcctcctttgctcttgggaagaccagctttgcagtgacagcttgagtgggttctctgcagccctcagattatttttcctctggctccttggatgtagtcagttagcatcattagtacatctttggagggtggggcaggagtatatgagcatcctctctcacatggaacgctttcataaacttcagggatcccgtgttgccatggaggcatgccaaatgttccatatgtgggtgtcagtcagggacaacaagatccttaatgcagagctagaggacttctggcagggaagtggggaagtgttccagatagcagggcatgaaaacttagagaggtacaagtggctgaaaatcgagtttttcctctgtctttaaattttatatgggctttgttatcttccactggaaaagtgtaatagcatacatcaatggtgtgttaaagctatttccttgccttttttttattggaatggtaggatatcttggctttgccacacacagttacagagtgaacactctactacatgtgactggcagtattaagtgtgcttattttaaatgttactggtagaaaggcagttcaggtatgtgtgtatatagtatgaatgcagtggggacaccctttgtggttacagtttgagacttccaaaggtcatccttaataacaacagatctgcaggggtatgttttaccatctgcatccagcctcctgctaactcctagctgactcagcatagattgtataaaatacctttgtaacggctcttagcacactcacagatgtttgaggctttcagaagctcttctaaaaaatgatacacacctttcacaagggcaaactttttccttttccctgtgtattctagtgaatgaatctcaagattcagtagacctaatgacatttgtattttatgatcttggctgtatttaatggcataggctgacttttgcagatggaggaatttcttgattaatgttgaaaaaaaacccttgattatactctgttggacaaaccgagtgcaatgaatgatgcttttctgaaaatgaaatataacaagtgggtgaatgtggttatggccgaaaaggatatgcagtatgcttaatggtagcaactgaaagaagacatcctgagcagtgccagctttcttctgttgatgccgttccctgaacataggaaaatagaaacttgcttatcaaaacttagcattaccttggtgctctgtgttctctgttagctcagtgtctttccttacatcaataggtttttttttttttttttggcctgaggaagtactgaccatgcccacagccaccggctgagcaaagaagctcatttcatgtgagttctaaggaatgagaaacaattttgatgaatttaagcagaaaatgaatttctgggaac

SEQ ID NO: 857 - protein, 1338 aa, Homo sapiens; identical to SEQ ID NO: 634

SEQ ID NO: 858 - DNA, 7680 bp, Homo sapiens; identical to SEQ ID NO: 635

SEQ ID NO: 859 - protein, 544 aa, Homo sapiens
MEKLQEHLIKAKAFTIKKTLEIYVPIKQFFYNLIHPEYSAVTDVYVLMFLADTVDFIIIVFGFWAFGKHSAAADITSSLSEDQVPGPFLVMVLIQFGTMVVDRALYLRKTVLGKVIFQVILVFGIHFWMFFILPGVTERKFSQNLVAQLWYFVKCVYFGLSAYQIRCGYPTRVLGNFLTKSYNYVNLFLFQGFRLVPFLTELRAVMDWVWTDTTLSLSSWICVEDIYAHIFILKCWRESEKPIFTMSAQQSQLKVMDQQSFNKFIQAFSRDTGAMQFLENYEKEDITVAELEGNSNSLWTISPPSKQKMIHELLDPNSSFSVVFSWSIQRNLSLGAKSEIATDKLSFPLKNITRKNIAKMIAGNSTESSKTPVTIEKIYPYYVKAPSDSNSKPIKQLLSENNFMDITIILSRDNTTKYNSEWWVLNLTGNRIYNPNSQALELVVFNDKVSPPSLGFLAGYGIMGLYASVVLVIGKFVREFFSGISHSIMFEELPNVDRILKLCTDIFLVRETGELELEEDLYAKLIFLYRSPETMIKWTREKTN

SEQ ID NO: 860 - DNA, 2329 bp, Homo sapiens
caaaagggaactttatatggaaaagcttcaagaacatttaatcaaagcaaaagcctttaccataaagaagacgctggagatctatgtgcccatcaaacagttcttttacaacctcatccacccggagtatagcgccgtgactgacgtgtatgtactcatgttcctggctgacactgtggacttcatcatcattgtcttcggcttttgggcctttgggaaacactcagcagctgcagacatcacctcttcactgtcagaggaccaggtcccggggccgtttttggtgatggtcctcattcagtttggaaccatggtggtggaccgagccctctacctcaggaagactgtactgggaaaggtcatcttccaggtcattcttgtgttcggaattcacttctggatgttcttcatcttacctggtgtgactgagaggaaattcagccagaacctggttgcccagctttggtactttgtgaaatgtgtttacttcgggttgtctgcttaccagatccgttgtggctacccaacgcgagtcctggggaacttcctcaccaagagctacaattacgtcaacctcttcttattccaagggtttcgcctcgtgccctttttgactgagctgagggcagtgatggactgggtgtggacggacacaactttgagcctgtccagctggatctgtgtggaggacatctatgctcacatattcatcctgaagtgttggcgggagtcggagaagcctattttcacaatgagtgcccaacaaagccagttgaaagttatggaccagcagagctttaacaaatttatacaagctttttctagggacaccggtgctatgcaatttctggaaaattatgaaaaagaagacataacagtagcagaactggaaggaaactcaaattctttgtggaccatcagcccacccagtaagcagaaaatgatacacgaactcctggaccccaatagtagcttctctgttgttttttcatggagtattcagagaaacttaagtctgggtgcaaaatcggaaatagcaacagataagctttcttttcctcttaaaaatattactcgaaagaatatcgctaaaatgatagcaggcaacagcacagaaagttcaaaaacaccagtgaccatagaaaagatttatccatattatgtgaaagcacctagtgattctaactcaaaacctataaagcaacttttatctgaaaataatttcatggatattaccatcattttgtccagagacaatacaactaaatataacagtgagtggtgggttctcaacctgactggaaacagaatatacaatccgaactctcaggccctggaactggtggtcttcaatgacaaagtcagtcccccaagtctggggttcctggctggctatggtattatgggattatatgcttcagttgtccttgtgattgggaaatttgtccgtgaattcttcagtgggatttctcactccatcatgtttgaagagcttccaaatgtggatcgaattttgaagttgtgcacagatatttttttagttcgagagacaggagaactggagctagaagaagatctctatgccaaattaatattcctatatcgctcaccagagacaatgatcaaatggactagagaaaaaacaaattgaaaccttagaacacagactgcaaataatgttaacatttgaattttttttaaaagcacaatattctcataagagctaagcatttctagttcgacggaaatggtttgtttctcttctgataggtagacaaaaggagctgatatccttctgcagtaaaagctacctggcaagttaaggcactgttgaaaatgttatttgtaactccatttctctgaaatcagggctacttgctttatgttttagtcaacagtgtctcgcattctgattgatcatgtgaaggaatcatttatgggccccgtccctaagagaaacagaagaggagtcagaaagaaagatgcctgtgttttcctctgtggggcccgtgcacttcctggagagatgctacaatgcaatatacagcgctccatccccactggggaagctgctgtgatgagactagatgagccttcaacacactcagaaaatgcaacagcaatagggggcagacagctcctacctgtgtttctaggagcaaaagagagggaactaattgcccgtgaagacgccagtggaaggatcagcctcattctaagcaaaaacatagtattagtgatactcttactgccttatcttaaccaaggactaataggatacctttccattaaacaccagtgacttctcaggaaaaaaaaaaaaaaaaaa

SEQ ID NO: 861 - protein, 170 aa, Homo sapiens
MTVQRLVAAAVLVALVSLILNNVAAFTSNWVCQTLEDGRRRSVGLWRSCWLVDRTRGGPSPGARAGQVDAHDCEALGWGSEAAGFQESRGTVKLQFDMMRACNLVATAALTAGQLTFLLGLVGLPLLSPDAPCWEEAMAAAFQLASFVLVIGLVTFYRIGHTPTCPGPAT

SEQ ID NO: 862 - DNA, 1870 bp, Homo sapiens
aaaaaacaaccatttcctctctgctgagagccagggaaggcgagctctgcgcacacgggcgtccctgcagcagccactctgctttccaggaccggccaactgccctggaggcatccacacaggggcccaggcagcacagaggagctgtgaacccgctccacaccggccaccctgcccggagcctggcactcacagcaggccggtgctaaggagtgtggcgcgggctcgactcccactgctgccggcctcccgagtgactctgttttccactgctgcaggcgagaagaggcacgcgcggcacaggccggcctccgcttcccgggaagacggcgcactcctggccctgggttcttgctgctgcccaccctctgctccctgggatgggccccgaggcgagcagcttcagcacaggcctggccctgctccaggtgcaggaaggaggataaggccgggccgagaggcggcacacctggaccatcccatgggcctccgcccgcgccgccccgaggatgagtggtgatgtcctctagccacccctagcagcgtcggctctccctggacgtgcggccgcggactgggacttggctttctccggataagcggcggcaccggcgtcagcgatgaccgtgcagagactcgtggccgcggccgtgctggtggccctggtctcactcatcctcaacaacgtggcggccttcacctccaactgggtgtgccagacgctggaggatgggcgcaggcgcagcgtggggctgtggaggtcctgctggctggtggacaggacccggggagggccgagccctggggccagagccggccaggtggacgcacatgactgtgaggcgctgggctggggctccgaggcagccggcttccaggagtcccgaggcaccgtcaaactgcagttcgacatgatgcgcgcctgcaacctggtggccacggccgcgctcaccgcaggccagctcaccttcctcctggggctggtgggcctgcccctgctgtcacccgacgccccgtgctgggaggaggccatggccgctgcattccaactggcgagttttgtcctggtcatcgggctcgtgactttctacagaattggccatacaccaacctgtcctggtcctgctacctgaacattggcgcctgccttctggccacgctggcggcagccatgctcatctggaacattctccacaagagggaggactgcatggccccccgggtgattgtcatcagccgctccctgacagcgcgctttcgccgtgggctggacaatgactacgtggagtcaccatgctgagtcgcccttctcagcgttccatcgatgcacacctgctatcgtggaacagcctagaaaccaagggactccaccaccaagtcacttcccctgctcgtgcagaggcacgggatgagtctgggtgacctctgcgccatgcgtgcgagacacgtgtgcgtttactgttatgtcggtcatatgtctgtacgtgtcgtgggccaacctcgttctgcctccagctttcctggttagcgcaacgcggctccacgaccacacgcacttcagggtggaagctggaagctgagacacaggttaggtggcgcgaggctgccctgcgctccgctttgctttgggattaatttattctgcatctgctgagaggggcaccccagccatatcttacactttggtaaagcagaaaaccaggaaaattttcttaaaatatccacaatattccttgagtgagtcagaatctatagccggttagtgatggtttcaggcagaatcgtgttcgtgtctgttttgctcgattcctttcctaagttaaataaatgcaagcctctgaacttctgtctataaaaaaaaaaaaaaaaa

SEQ ID NO: 863 - DNA, 1997 bp, Homo sapiens
  CDS: (352)..(1608)
cccgccccgcctctccaaaaagctacaccgacgcggaccgcggcggcgtcctccctcgccctcgcttcacctcgcgggctccgaatgcggggagctcggatgtccggtttcctgtgaggcttttacctgacacccgccgcctttccccggcactggctgggagggcgccctgcaaagttgggaacgcggagccccggacccgctcccgccgcctccggctcgcccagggggggtcgccgggaggagcccgggggagagggaccaggaggggcccgcggcctcgcaggggcgcccgcgcccccacccctgcccccgccagcggaccggtcccccacccccggtccttccaccatgcacttgctgggcttcttctctgtggcgtgttctctgctcgccgctgcgctgctcccgggtcctcgcgaggcgcccgccgccgccgccgccttcgagtccggactcgacctctcggacgcggagcccgacgcgggcgaggccacggcttatgcaagcaaagatctggaggagcagttacggtctgtgtccagtgtagatgaactcatgactgtactctacccagaatattggaaaatgtacaagtgtcagctaaggaaaggaggctggcaacataacagagaacaggccaacctcaactcaaggacagaagagactataaaatttgctgcagcacattataatacagagatcttgaaaagtattgataatgagtggagaaagactcaatgcatgccacgggaggtgtgtatagatgtggggaaggagtttggagtcgcgacaaacaccttctttaaacctccatgtgtgtccgtctacagatgtgggggttgctgcaatagtgaggggctgcagtgcatgaacaccagcacgagctacctcagcaagacgttatttgaaattacagtgcctctctctcaaggccccaaaccagtaacaatcagttttgccaatcacacttcctgccgatgcatgtctaaactggatgtttacagacaagttcattccattattagacgttccctgccagcaacactaccacagtgtcaggcagcgaacaagacctgccccaccaattacatgtggaataatcacatctgcagatgcctggctcaggaagattttatgttttcctcggatgctggagatgactcaacagatggattccatgacatctgtggaccaaacaaggagctggatgaagagacctgtcagtgtgtctgcagagcggggcttcggcctgccagctgtggaccccacaaagaactagacagaaactcatgccagtgtgtctgtaaaaacaaactcttccccagccaatgtggggccaaccgagaatttgatgaaaacacatgccagtgtgtatgtaaaagaacctgccccagaaatcaacccctaaatcctggaaaatgtgcctgtgaatgtacagaaagtccacagaaatgcttgttaaaaggaaagaagttccaccaccaaacatgcagctgttacagacggccatgtacgaaccgccagaaggcttgtgagccaggattttcatatagtgaagaagtgtgtcgttgtgtcccttcatattggaaaagaccacaaatgagctaagattgtactgttttccagttcatcgattttctattatggaaaactgtgttgccacagtagaactgtctgtgaacagagagacccttgtgggtccatgctaacaaagacaaaagtctgtctttcctgaaccatgtggataactttacagaaatggactggagctcatctgcaaaaggcctcttgtaaagactggttttctgccaatgaccaaacagccaagattttcctcttgtgatttctttaaaagaatgactatataatttatttccactaaaaatattgtttctgcattcatttttatagcaacaacaattggtaaaactcactgtgatcaatatttttatatcatgcaaaatatgtttaaaataaaatgaaaattgtattat

SEQ ID NO: 864 - protein, 419 aa, Homo sapiens; identical to SEQ ID NO: 436

SEQ ID NO: 865 - DNA, 2029 bp, Homo sapiens
  CDS: (411)..(1472)
gttgggttccagctttctgtagctgtaagcattggtggccacaccacctccttacaaagcaactagaacctgcggcatacattggagagatttttttaattttctggacatgaagtaaatttagagtgctttctaatttcaggtagaagacatgtccaccttctgattatttttggagaacattttgatttttttcatctctctctccccacccctaagattgtgcaaaaaaagcgtaccttgcctaattgaaataatttcattggattttgatcagaactgattatttggttttctgtgtgaagttttgaggtttcaaactttccttctggagaatgccttttgaaacaattttctctagctgcctgatgtcaactgcttagtaatcagtggatattgaaatattcaaaatgtacagagagtgggtagtggtgaatgttttcatgatgttgtacgtccagctggtgcagggctccagtaatgaacatggaccagtgaagcgatcatctcagtccacattggaacgatctgaacagcagatcagggctgcttctagtttggaggaactacttcgaattactcactctgaggactggaagctgtggagatgcaggctgaggctcaaaagttttaccagtatggactctcgctcagcatcccatcggtccactaggtttgcggcaactttctatgacattgaaacactaaaagttatagatgaagaatggcaaagaactcagtgcagccctagagaaacgtgcgtggaggtggccagtgagctggggaagagtaccaacacattcttcaagcccccttgtgtgaacgtgttccgatgtggtggctgttgcaatgaagagagccttatctgtatgaacaccagcacctcgtacatttccaaacagctctttgagatatcagtgcctttgacatcagtacctgaattagtgcctgttaaagttgccaatcatacaggttgtaagtgcttgccaacagccccccgccatccatactcaattatcagaagatccatccagatccctgaagaagatcgctgttcccattccaagaaactctgtcctattgacatgctatgggatagcaacaaatgtaaatgtgttttgcaggaggaaaatccacttgctggaacagaagaccactctcatctccaggaaccagctctctgtgggccacacatgatgtttgacgaagatcgttgcgagtgtgtctgtaaaacaccatgtcccaaagatctaatccagcaccccaaaaactgcagttgctttgagtgcaaagaaagtctggagacctgctgccagaagcacaagctatttcacccagacacctgcagctgtgaggacagatgcccctttcataccagaccatgtgcaagtggcaaaacagcatgtgcaaagcattgccgctttccaaaggagaaaagggctgcccaggggccccacagccgaaagaatccttgattcagcgttccaagttccccatccctgtcatttttaacagcatgctgctttgccaagttgctgtcactgtttttttcccaggtgttaaaaaaaaaatccattttacacagcaccacagtgaatccagaccaaccttccattcacaccagctaaggagtccctggttcattgatggatgtcttctagctgcagatgcctctgcgcaccaaggaatggagaggaggggacccatgtaatccttttgtttagttttgtttttgttttttggtgaatgagaaaggtgtgctggtcatggaatggcaggtgtcatatgactgattactcagagcagatgaggaaaactgtagtctctgagtcctttgctaatcgcaactcttgtgaattattctgattcttttttatgcagaatttgattcgtatgatcagtactgactttctgattactgtccagcttatagtcttccagtttaatgaactaccatctgatgtttcatatttaagtgtatttaaagaaaataaacaccattattcaagccaaaaaaaaaaaaaaaaaa

SEQ ID NO: 866 - protein, 354 aa, Homo sapiens
MYREWVVVNVFMMLYVQLVQGSSNEHGPVKRSSQSTLERSEQQIRAASSLEELLRITHSEDWKLWRCRLRLKSFTSMDSRSASHRSTRFAATFYDIETLKVIDEEWQRTQCSPRETCVEVASELGKSTNTFFKPPCVNVFRCGGCCNEESLICMNTSTSYISKQLFEISVPLTSVPELVPVKVANHTGCKCLPTAPRHPYSIIRRSIQIPEEDRCSHSKKLCPIDMLWDSNKCKCVLQEENPLAGTEDHSHLQEPALCGPHMMFDEDRCECVCKTPCPKDLIQHPKNCSCFECKESLETCCQKHKLFHPDTCSCEDRCPFHTRPCASGKTACAKHCRFPKEKRAAQGPHSRKNP

1. A method for differentially modulating the growth or differentiation of blood endothelial cells (BEC) or lymphatic endothelial cells (LEC), comprising contacting endothelial cells with a composition comprising an agent that differentially modulates blood or lymphatic endothelial cells, said agent selected from the group consisting of:
(a) a polypeptide that comprises an amino acid sequence of a BEC polypeptide or a LEC polypeptide, or an active fragment of said polypeptide;
(b) a polynucleotide that comprises a nucleotide sequence that encodes a polypeptide according to (a);
(c) an antibody that specifically binds to a polypeptide according to (a);
(d) a polypeptide comprising a fragment of the-antibody of (c), wherein the fragment and the antibody bind to the polypeptide;
(e) an antisense nucleic acid to a human gene or mRNA encoding the polypeptide of (a);
(f) an interfering RNA (RNAi) to a human gene or mRNA encoding the polypeptide of (a).

2. A method according to claim 1, wherein the endothelial cells are contacted with the composition ex vivo.

3. A method according to claim 1, wherein the composition comprises a pharmaceutically acceptable diluent, adjuvant, or carrier, and the contacting step comprises administering the composition to a mammalian subject to differentially modulate BECs or LECs in the mammalian subject.

4. A method according to claim 3, comprising:
identifying a human subject with a disorder characterized by hyperproliferation of LECs; and
administering to the human subject the composition, wherein the agent differentially inhibits LEC growth compared to BEC growth.

5. A method according to claim 3, comprising:
identifying a human subject with a disorder characterized by hyperproliferation of LECs;
screening LECs of the subject to identify overexpression of a polypeptide set forth in Table 3; and
administering to the human subject the composition, wherein the agent differentially inhibits LEC growth compared to BEC growth by inhibiting expression of the polypeptide identified by the screening step.

6. A method according to claim 3 of modulating the growth of lymphatic endothelial cells in a human subject, comprising steps of:
identifying a human subject with a hypoproliferative lymphatic disorder;
screening the subject to identify underexpression or underactivity of a LEC polypeptide set forth in Table 3, wherein said protein is not set forth in Table 1 or 2;
administering to the human subject said composition, wherein the agent comprises the LEC polypeptide (a) identified by the screening step or an active fragment of said polypeptide, or comprises the polynucleotide (b) that comprises a nucleotide sequence that encodes the polypeptide.

7. Use of an agent for the manufacture of a medicament for the differential modulation of blood vessel endothelial cell (BEC) or lymphatic vessel endothelial cell (LEC) growth or differentiation, said agent selected from the group consisting of:
(a) a polypeptide that comprises an amino acid sequence of a BEC polypeptide or a LEC polypeptide, or an active fragment of said polypeptide;
(b) a polynucleotide that comprises a nucleotide sequence that encodes a polypeptide according to (a);
(c) an antibody that specifically binds to a polypeptide according to (a);
(d) a polypeptide comprising a fragment of the antibody of (c), wherein the fragment and the antibody bind to the polypeptide;
(e) an antisense nucleic acid to a human gene or mRNA encoding the polypeptide of (a);
(f) an interfering RNA (RNAi) to a human gene or mRNA encoding the polypeptide of (a).

8. A method or use according to claim 1, wherein the polypeptide is a LEC polypeptide selected from the LEC polypeptides set forth in Table 3, and the agent differentially modulates LEC growth or differentiation over BEC growth or differentiation.

9. A method or use according to claim 1, wherein the polypeptide is a BEC polypeptide selected from the BEC polypeptides set forth in Table 4, and the agent differentially modulates BEC growth or differentiation over LEC growth or differentiation.

10. A method or use according to claim 8, wherein the polypeptide is not set forth in Tables 1 or 2.

11. A method or use according to claim 8, wherein the LEC polypeptide comprises an amino acid sequence selected from the group consisting of SEQ ID NOs: 81, 187, 207, 211, 221, 235, 241, 293, and 391.

12. A method or use according to claim 8, wherein the LEC polypeptide comprises an amino acid sequence selected from the group consisting of SEQ ID NOs: 31-34, 46, and 48.

13. A method or use according to claim 12, wherein the agent comprises an antibody according to (c) or polypeptide according to (d).

14. A method according to claim 12, wherein the agent comprises an extracellular domain fragment of the polypeptide of (a), or a polynucleotide encoding said extracellular domain fragment.

15. A method or use according to claim 1, wherein the agent comprises an antisense molecule.

16. A method of treating hereditary lymphedema comprising:
identifying a human subject with lymphedema and with a mutation in at least one allele of a gene encoding a LEC protein identified in Table 3, wherein the mutation correlates with lymphedema in human subjects, and with the proviso that said LEC protein is not VEGFR-3; and
administering to said subject a composition comprising a lymphatic growth agent selected from the group consisting of VEGF-C polypeptides, VEGF-D polypeptides, VEGF-C polynucleotides, and VEGF-D polynucleotides.

17. Use of a lymphatic growth agent selected from the group consisting of VEGF-C polypeptides, VEGF-D polypeptides, VEGF-C polynucleotides, and VEGF-D polynucleotides in the manufacture of a medicament for the treatment of hereditary lymphedema resulting from a mutation in a LEC gene identified in Table 3, with the proviso that said gene is not VEGFR-3.

18. A method of screening for an endothelial cell disorder or predisposition to said disorder, comprising
obtaining a biological sample containing endothelial cell mRNA from a human subject; and
measuring expression of a BEC or LEC gene from the amount of mRNA in the sample transcribed from said gene, wherein the BEC or LEC gene encodes a polypeptide identified in Table 3 or 4.

19. A method of monitoring the efficacy or toxicity of a drug on endothelial cells, comprising steps of:
measuring expression of at least one BEC or LEC gene in endothelial cells of a mammalian subject before and after administering a drug to the subject, wherein the at least one BEC or LEC gene encodes a polypeptide set forth in Table 3 or Table 4, and wherein changes in expression of the BEC or LEC gene correlates with efficacy or toxicity of the drug on endothelial cells.

20. A method of identifying compounds that modulate growth of endothelial cells, comprising
culturing endothelial cells in the presence and absence of a compound; and
measuring expression of at least one BEC or LEC gene in the cells, wherein the BEC or LEC gene is selected from the genes encoding polypeptides set forth in Tables 3 and 4, wherein a change in expression of at least one BEC gene in the presence compared to the absence of the compound identifies the compound as a modulator of BEC growth, and wherein a change in expression of at least one LEC gene in the presence compared to the absence of the compound identifies the compound as a modulator of LEC growth.

21. A method according to claim 20 of screening for a compound that selectively modulates BEC or LEC growth or differentiation,
wherein the measuring step comprises measuring expression of at least one BEC gene and at least one LEC gene in the cells, and
wherein the method comprises screening for a compound that selectively modulates BEC or LEC growth or differentiation by selecting a compound that differentially modulates expression of the at least one BEC gene compared to expression of the at least one LEC gene.

22. A composition comprising
an isolated polynucleotide that comprises a nucleotide sequence that encodes a polypeptide comprising an amino acid sequence selected from the group consisting of SEQ ID NOs: 31-44, 46, 48, 50, 52, 81, 187, 207, 211, 221, 235, 241, 293, and 391; and
a pharmaceutically acceptable diluent, carrier or adjuvant.

23. A composition according to claim 22, comprising a polynucleotide that comprises a nucleotide sequence selected from the group consisting of SEQ ID NOS: 14-30, 45, 47, 49, 51, 82, 93, 111, 188, 208, 212, 222, 236, 242, 294, and 392, or a fragment thereof that encodes the polypeptide.

24. An expression vector comprising an expression control sequence operably linked to a polynucleotide that comprises a nucleotide sequence that encodes a polypeptide comprising an amino acid sequence selected from the group consisting of SEQ ID NOs: 31-44, 46, 48, 50, 52, 81, 187, 207, 211, 221, 235, 241, 293, and 391.

25. An expression vector according to claim 24 that is a replication-deficient adenoviral or adeno-associated viral vector containing the polynucleotide.

26. A composition comprising an expression vector according to claim 24 and a pharmaceutically acceptable diluent, carrier, or adjuvant.

27. A kit comprising the composition according to claim 22 packaged with a protocol for administering the composition to a mammalian subject to modulate the lymphatic system in said subject.

28. A host cell transformed or transfected with an expression vector according to claim 24.

29. A method for producing a LEC polypeptide comprising steps of growing a host cell according to claim 28 under conditions in which the cell expresses the polypeptide encoded by the polynucleotide.

30. A purified and isolated polypeptide comprising an amino acid sequence selected from the group consisting of SEQ ID NOS: 31-44, 46, 48, 50, 52, 81, 187, 207, 211, 221, 235, 241, 293, and 391.

31. A purified and isolated polypeptide comprising an amino acid sequence selected from the group consisting of:
(a) SEQ ID NOS: 31-34, 46, 48, 207, 676, 859, and 861; and
(b) an extracellular domain fragment of at least 10 amino acids of an amino acid sequence of (a).

32. A purified and isolated, soluble polypeptide according to claim 31 comprising an extracellular domain fragment of an amino acid sequence selected from the group consisting of: SEQ ID NOS: 31-34, 46, 48, 207, 676, 859, and 861, wherein the polypeptide lacks any transmembrane domain.

33. A polypeptide according to claim 32 that lacks any intracellular domain.

34. A fusion protein comprising a polypeptide according to claim 32 fused to an immunoglobulin fragment comprising an immunoglobulin constant region.

35. A composition comprising a polypeptide or protein according to claim 30 and a pharmaceutically acceptable diluent, carrier or adjuvant.

36. A kit comprising the composition according to claim 35 and a protocol for administering said pharmaceutical composition to a mammalian subject to modulate the lymphatic system in said subject.

37. An antibody that specifically binds to a polypeptide according to claim 30.

38. An antibody according to claim 37 that is a humanized antibody.

39. A protein comprising an antigen binding domain of an antibody that specifically binds-to a polypeptide according to claim 30, wherein said protein specifically binds to said polypeptide.

40. A method of identifying a LEC nucleic acid comprising:
(a) contacting a biological sample containing a candidate LEC nucleic acid with a polynucleotide comprising a fragment of at least 14 contiguous nucleotides of a sequence selected from the group consisting of SEQ ID NOS:1-30, 45, 47, 49, 51, 82, 93, 111, 188, 208, 212, 236, 242, 294, and 392, or a complement thereof, under the following stringent hybridization conditions:
(i) hybridization at 42° C. for 20 hours in a solution containing 50% formamide, 5×SSPE, 5× Denhardt's solution, 0.1% SDS and 0.1 mg/ml denatured salmon sperm DNA, and
(ii) washing for 30 minutes at 65° C. in 1×SSC, 0.1% SDS; and
(b) detecting hybridization of said candidate LEC nucleic acid and said polynucleotide, thereby identifying a LEC nucleic acid.

41. A method of identifying a LEC protein comprising:
(a) contacting a biological sample containing a candidate LEC protein with a LEC protein binding partner selected from the group consisting of an antibody according to claim 37, under conditions suitable for binding therebetween; and
(b) detecting binding between said candidate LEC protein and said LEC binding partner, thereby identifying a LEC protein.

42. A method of identifying a LEC comprising:
(a) contacting a biological sample comprising cells with a LEC binding partner under conditions suitable for binding therebetween, wherein said LEC binding partner comprises an antibody that binds to a polypeptide comprising a sequence selected from the group consisting of SEQ ID NOS:31-34, 46, 48, 207, 676, 859, and 861, or comprises an antigen binding fragment of said antibody; and
(b) identifying a LEC by detecting binding between a cell and said LEC binding partner, where binding of the LEC binding partner to the cell identifies a LEC.

43. A method of assaying for risk of developing hereditary lymphedema, comprising.
(a) assaying nucleic acid of a human subject for a mutation that correlates with a hereditary lymphedema phenotype and alters the encoded amino acid sequence of at least one gene allele of the human subject when compared to the amino acid sequence of the polypeptide encoded by a corresponding wild-type gene allele, wherein the wild-type polypeptide is a polypeptide identified in Table 3.

44. A method of assaying for risk of developing hereditary lymphedema, comprising
(a) assaying nucleic acid of a human subject for a mutation that correlates with a hereditary lymphedema phenotype and alters the encoded amino acid sequence of at least one gene allele of the human subject when compared to the amino acid sequence of the polypeptide encoded by a corresponding wild-type gene allele, wherein the wild-type polypeptide comprises an amino acid sequence selected from the group consisting of SEQ ID NOS: 31-44, 46, 48, 52, 54, 207, 676, 859, and 861;
(b) correlating the presence or absence of said mutation in the nucleic acid to a risk of developing hereditary lymphedema, wherein the presence of said mutation in the nucleic acid correlates with an increased risk of developing hereditary lymphedema, and wherein the absence of said mutation in the nucleic acid correlates with no increased risk of developing hereditary lymphedema.

45. A method of assaying for risk of developing hereditary lymphedema, comprising
(a) assaying nucleic acid of a human subject for a mutation that alters the encoded amino-acid sequence of at least one transcription factor allele of the human subject and alters transcription modulation activity of the transcription factor polypeptide encoded by the allele, when compared to the transcription modulation activity of a transcription factor polypeptide encoded by a wild-type allele,
wherein the wild-type transcription factor polypeptide comprises an amino acid sequence selected from the group consisting of SEQ ID NO: 81, SEQ ID NO: 211, SEQ ID NO: 241, and transcription factors encoded by sequences in Table 5; and
(b) correlating the presence or absence of said mutation in the nucleic acid to a risk of developing hereditary lymphedema, wherein the presence of said mutation in the nucleic acid correlates with an increased risk of developing hereditary lymphedema, and wherein the absence of said mutation in the nucleic acid correlates with no increased risk of developing hereditary lymphedema.

46. The method according to claim 45 wherein said wild-type transcription factor allele comprises the Sox18 amino acid sequence set forth as SEQ ID NO:54.

47. The method according to claim 46 wherein the assaying identifies a mutation altering a transactivating or DNA binding domain amino acid sequence of the protein encoded by the Sox18 allele.

48. The method according to claim 46, wherein said mutation reduces transcriptional activation of a SOX18-responsive gene compared to transcriptional activation of said gene by wild-type SOX18.

49. A method of assaying for risk of developing hereditary lymphedema, comprising
(a) assaying nucleic acid of a human subject for a mutation that alters the encoded amino acid sequence of at least one LEC gene allele of the human subject and alters the, binding affinity of the adhesion polypeptide encoded by the LEC gene allele, when compared to the binding affinity of an adhesion polypeptide encoded by a wild-type allele,
wherein the wild-type adhesion polypeptide comprises an amino acid sequence selected from the group consisting of SEQ ID NOS:31-34, 46, 207, 676, 859, and 861; and
(b) correlating the presence or absence of said mutation in the nucleic acid to a risk of developing hereditary lymphedema, wherein the presence of said mutation in the nucleic acid correlates with an increased risk of developing hereditary lymphedema, and wherein the absence of said mutation in the nucleic acid correlates with no increased risk of developing hereditary lymphedema.

50. The method according to claim 43, wherein the assaying identifies the presence of the mutation, and the correlating step identifies the increased risk of said patient developing hereditary lymphedema.

51. A method of screening a human subject for an increased risk of developing hereditary lymphedema comprising assaying nucleic acid of a human subject for a mutation that alters the encoded amino acid sequence of at least one polypeptide comprising an amino acid sequence of Table 3.

52. A method of claim 51, wherein the polypeptide comprises an amino acid sequence selected from the group consisting of SEQ ID NOS: 31-44, 46, 48, 50, 52, and 54, 207, 676, 859, and 861 in a manner that correlates with the risk of developing hereditary lymphedema.

53. The method according to claim 52 wherein the polypeptide comprises the SOX18 amino acid sequence set forth in SEQ ID NO: 54.

54. The method according to claim 43 wherein said method comprises at least one procedure selected from the group consisting of:
(a) determining a nucleotide sequence of at least one codon of at least one polynucleotide of the human subject;
(b) performing a hybridization assay: to determine whether nucleic acid from the human subject has a nucleotide sequence identical to or different from one or more reference sequences;
(c) performing a polynucleotide migration assay to determine whether nucleic acid from the-human subject has a nucleotide sequence identical to or different from one or more reference sequences; and
(d) performing a restriction endonuclease digestion to determine whether nucleic acid from the human subject has a nucleotide sequence identical to or different from one or more reference sequences.

55. The method according to claim 43 wherein said method comprises: performing a polymerase chain reaction (PCR) to amplify nucleic acid comprising the coding sequence of said LEC polynucleotide, and determining nucleotide sequence of the amplified nucleic acid.

56. A method of screening for a hereditary lymphedema genotype in a human subject, comprising:
(a) providing a biological sample comprising nucleic acid from said subject, and
(b) analyzing said nucleic acid for the presence of a mutation altering the encoded amino acid sequence of the at least one allele of at least one gene in the human subject relative to a human gene encoding an amino acid sequence selected from the group consisting of SEQ ID NOs: 31-44, 46, 48, 50, 52, 54, 207, 676, 859, and 861, wherein the presence of a mutation altering the encoded amino acid sequence in the human subject in a manner that correlates with lymphedema in human subjects identifies a hereditary lymphedema genotype.

57. The method according to claim 56 wherein said biological sample is a cell sample.

58. The method according to claim 56 wherein said analyzing comprises sequencing a portion of said nucleic acid.

59. The method according to claim 56 wherein the human subject has a hereditary lymphedema genotype identified by the method of screening.

60. The method according to claim 49, wherein the at least one gene corresponds to the human Sox18 gene that encodes the amino acid sequence set forth in SEQ ID NO: 54.

61. A method of inhibiting lymphangiogenesis comprising
administering to a subject an inhibitor of a LEC transmembrane polypeptide,
wherein the LEC transmembrane polypeptide comprises an amino acid sequence selected from the group consisting of SEQ ID NOs: 31-34, 46 48, 207, 676, 859, and 861, and
wherein the inhibitor is selected from the group consisting of
(a) a soluble extracellular domain fragment of the LEC transmembrane polypeptide;
(b) an antibody that binds to the extracellular domain of the LEC transmembrane polypeptide;
(c) a polypeptide comprising an antigen binding domain of the antibody according to (b); and
(d) an antisense nucleic acid complementary to the nucleic acid encoding the LEC transmembrane polypeptide or its complement.

62. A method according to claim 61, wherein the inhibitor is a polypeptide comprising an extracellular domain fragment of an LEC polypeptide, wherein the sequence of said extracellular domain is selected from the group consisting of amino acids 1-152 of SEQ ID NO:31, amino acids 1-695 of SEQ ID NO:32 and amino acids 1-248 of SEQ ID NO:33.

63. The method according to claim 61 wherein said subject is a human containing a tumor.

64. A method for modulating lymphangiogenesis in a mammalian subject comprising: administering to a mammalian subject in need of modulation of lymphangiogenesis an antisense molecule to a LEC polynucleotide, in an amount effective to inhibit transcription or translation of the polypeptide encoded by the LEC polynucleotide, wherein the LEC polynucleotide comprises a nucleotide sequence selected from the group consisting of SEQ ID NOS: 14-30, 45, 47, 49, AND 51, 208, 677, 860, and 862.

65. A method of treating hereditary lymphedema, comprising:
(a) identifying a human subject with hereditary lymphedema and with a mutation that alters the encoded amino acid sequence of at least one polypeptide of the human subject, relative to the amino acid sequence of a polypeptide comprising an amino acid sequence selected from the group consisting of SEQ ID NOS: 31-44, 46, 48, 50, 52, 54, 207, 676, 859, and 861; and
(b) administering to said subject a lymphatic growth factor selected from the group consisting of a VEGF-C polynucleotide, a VEGF-C polypeptide, a VEGF-D polynucleotide, and a VEGF-D polypeptide.

66. A method of modulating the growth of endothelial cells or endothelial precursor cells, comprising contacting endothelial cells or endothelial precursor cells with a composition comprising an agent the modulates prox-1 transcription regulation in the cells, wherein the agent is selected from the group consisting of:
(a) a prox-1 polypeptide;
(b) a polynucleotide encoding a prox-1 polypeptide;
(c) an antisense molecule to prox-1.

67. A method according to claim 66, wherein the cells comprises cultured endothelial cells or endothelial precursor cells, and the contacting is performed ex vivo.

68. A method according to claim 67, wherein the contacting comprises including the agent in the culture medium.

69. A method according to claim 66, wherein the cells comprise endothelial precursor cells.

70. A method according to claim 66, wherein the cells are introduced into a mammalian subject after the contacting step.

71. A method according to claim 70, wherein the subject is human.

72. A method according to claim 71, wherein the human subject has a LEC disorder.

73. A method of increasing LEC function in a human subject, comprising:
isolating endothelial cells or endothelial precursor cells from a human subject;
transforming or transfecting the endothelial cells with an expression vector comprising a nucleotide sequence encoding a prox-1 polypeptide, to promote LEC differentiation and growth; and
administering the LEC cells to a human subject after the transforming or transfecting step.

74. A method according to claim 73, wherein the human subject of the isolating and administering steps is the same.

75. A method according to claim 73, wherein the human subject has lymphedema.

76. A method according to claim 73, wherein the vector and transforming or transfecting method are selected for transient expression of the prox-1.

77. A method according to claim 73, wherein the expression vector comprises a replication-deficient adenoviral vector.

78. An isolated polypeptide comprising an amino acid sequence at least 95% identical to amino acids 61-127 of SEQ ID NO: 31.

79. A polypeptide according to claim 78, comprising an amino acid sequence at least 95% identical to amino acids 30-152 of SEQ ID NO: 31.

80. A soluble polypeptide comprising a fragment of the amino acid sequence set forth in SEQ ID NO: 31, wherein said fragment lacks the transmembrane and intracellular amino acids of SEQ ID NO: 31.

81. An isolated polypeptide comprising at least one leucine-rich region of SEQ ID NO: 32.

82. An isolated polypeptide according to claim 81, wherein the polypeptide lacks transmembrane amino acids of SEQ ID NO: 32.

83. An isolated polypeptide comprising at least one leucine-rich region of SEQ ID NO: 33.

84. An isolated polypeptide according to claim 81, wherein the polypeptide lacks transmembrane amino acids of SEQ ID NO: 33.

85. An isolated polypeptide comprising an amino acid sequence at least 95% identical to a fragment of a polypeptide comprising the amino acid sequence set forth in SEQ ID NO: 111,
wherein said fragment includes at least one thrombospondin type I repeat sequence.

86. An isolated polypeptide according to claim 85, wherein said fragment includes the six thrombospondin type I repeat sequences of SEQ ID NO: 111.

87. An isolated polypeptide comprising an amino acid sequence at least 95% identical to a fragment of a polypeptide comprising the amino acid sequence set forth in SEQ ID NO: 111,
wherein said fragment includes at least one immunoglobulin C-2 type domain.

88. An isolated polypeptide according to claim 85, wherein said fragment includes the three immunoglobulin C-2 type domain sequences of SEQ ID NO: 111.

89. A fusion protein comprising a polypeptide according to claim 78 and a heterologous polypeptide.

90. An antibody that specifically binds to a polypeptide according to claim 78.

91. A polynucleotide comprising a nucleotide sequence that encodes a polypeptide according to claim 78.

92. An expression vector comprising a polynucleotide according to claim 91 operatively linked to an expression control sequence.

93. An expression vector according to claim 92 that is a replication deficient adenoviral vector.

94. A method or use according to claim 9, wherein the polypeptide is not set forth in Tables 1 or 2.

95. A method or use according to claim 1, wherein the agent comprises an antisense molecule, and wherein the polypeptide is not set forth in Tables 1 or 2.

96. The method according to claim 43, wherein the assaying identifies the presence of the mutation, and the correlating step identifies the increased risk of said patient developing hereditary lymphedema, and wherein said method comprises at least one procedure selected from the group consisting of:
(a) determining a nucleotide sequence of at least one codon of at least one polynucleotide of the human subject;
(b) performing a hybridization assay to determine whether nucleic acid from the human subject has a nucleotide sequence identical to or different from one or more reference sequences;
(c) performing a polynucleotide migration assay to determine whether nucleic acid from the human subject has a nucleotide sequence identical to or different from one or more reference sequences; and
(d) performing a restriction endonuclease digestion to determine whether nucleic acid from the human subject has a nucleotide sequence identical to or different from one or more reference sequences.

97. The method according to claim 43, wherein the assaying identifies the presence of the mutation, and the correlating step identifies the increased risk of said patient developing hereditary lymphedema, wherein said method comprises: performing a polymerase chain reaction (PCR) to amplify nucleic acid comprising the coding sequence of said LEC polynucleotide, and determining nucleotide sequence of the amplified nucleic acid

98. A method according to claim 73, wherein the human subject has lymphedema, and wherein the vector and transforming or transfecting method are selected for transient expression of the prox-1.

99. A method according to claim 73, wherein the human subject has lymphedema, and wherein the expression vector comprises a replication-deficient adenoviral vector.
